(19) United States
(12) Patent Application Publication
(10) Pub. No.: US 2010/0092965 A1
(43) Pub. Date: Apr. 15, 2010

(54) GENETIC VARIATIONS ASSOCIATED WITH TUMORS

(76) Inventors: Somasekar Seshagiri, San Carlos, CA (US); Brock Peters, San Francisco, CA (US); Zhengyan Kan, Redwood City, CA (US)

Correspondence Address: GENENTECH, INC., 1 DNA WAY, SOUTH SAN FRANCISCO, CA, 94080, US

(21) Appl. No.: 12/514,053

(22) PCT Filed: Nov. 15, 2007
(86) PCT No.: PCT/US07/84888

§ 371 Date: Nov. 24, 2009

Related U.S. Application Data
(60) Provisional application No. 60/866,103, filed on Nov. 16, 2006.
(60) Provisional application No. 60/948,818, filed on Jul. 10, 2007.

(51) Int. Cl. C12Q 1/68

(52) U.S. Cl. 435/6

(57) ABSTRACT

Nucleotide and amino acid variations associated with tumors are provided. Methods for detecting variations and for diagnosing and treating tumors are provided.

### CROSS REFERENCES TO RELATED APPLICATIONS

[0001] This application claims the benefit of U.S. Provisional Application No. 60/866,103, filed Nov. 16, 2006, and U.S. Provisional Application No. 60/948,818, filed Jul. 10, 2007, the disclosures of which are incorporated herein by reference in their entirety.

### FIELD OF THE INVENTION

[0002] The present invention generally relates to genetic variations associated with tumors.

### BACKGROUND

[0003] Cancers may arise when cells accumulate somatic mutations that ultimately confer a growth advantage. Somatic mutations include, e.g., nucleotide base substitutions, deletions, insertions, amplifications, and rearrangements. Identification of somatic mutations that occur in cancer provides valuable information regarding the development of cancer. Such information is also useful for the identification of diagnostic markers and therapeutic targets in cancer. (See, e.g., Bamford et al. (2004) British Journal of Cancer 91:355-358.) Thus, a continuing need exists to identify somatic mutations that occur in cancer.

[0004] Germline variations, or polymorphisms, are heritable variations that are present in an organism's genome. Polymorphisms include restriction fragment length polymorphisms (RFLPs), short tandem repeats (STRs), and single nucleotide polymorphisms (SNPs). Germline variations may be associated with susceptibility to certain diseases, including cancer. (See, e.g., Vierimaa et al. (2006) Science 312:1228-1230; Landi et al. (2006) Science 313:521-522; Zhu et al. (2004) Cancer Research 64:2251-2257.) Thus, a continuing need exists to identify polymorphisms associated with cancer.

[0005] The identification of variations associated with cancer has proven valuable in clinical settings, e.g., in distinguishing patient populations that are responsive to a particular therapy.

[0006] (See, e.g., Lynch et al. (2004) N. Engl. J. Med. 350:2129-2139; O′Hare (2004) Blood 104:2532-2539).

[0007] The invention described herein meets the above-described needs and provides other benefits.

### SUMMARY

[0008] The compositions and methods of the invention are based, in part, on the discovery of novel variations in polynucleotides derived from tumor samples.

[0009] In one aspect, an isolated polynucleotide is provided, wherein the isolated polynucleotide comprises (a) a PRO polynucleotide or fragment thereof that is at least about 10 nucleotides in length, wherein the PRO polynucleotide or fragment thereof comprises a nucleotide variation at a nucleotide position selected from FIGS. 1-3, or (b) the complement of (a). In one embodiment, the nucleotide variation occurs in SEQ ID NOs:1-37. In another embodiment, the nucleotide variation is a nucleotide change selected from FIGS. 1-3. In another embodiment, the isolated polynucleotide is a primer. In another embodiment, the isolated polynucleotide is an oligonucleotide.

[0010] In another aspect, an oligonucleotide is provided that is (a) an allele-specific oligonucleotide that hybridizes to a region of a PRO polynucleotide comprising a nucleotide variation at a nucleotide position selected from FIGS. 1-3, or (b) the complement of (a). In one embodiment, the nucleotide variation is a nucleotide change selected from FIGS. 1-3.

[0011] In another embodiment, the allele-specific oligonucleotide is an allele-specific primer. In another embodiment, a kit comprising the oligonucleotide and at least one enzyme is provided. In one such embodiment, the at least one enzyme is a polymerase. In another such embodiment, the at least one enzyme is a ligase. In a further embodiment, a microarray comprising the oligonucleotide is provided.

[0012] In another aspect, a method of detecting the absence or presence of a nucleotide variation at a nucleotide position selected from FIGS. 1-3 is provided, the method comprising (a) contacting nucleic acid suspected of comprising the nucleotide variation with an allele-specific oligonucleotide that is specific for the nucleotide variation under conditions suitable for hybridization of the allele-specific oligonucleotide to the nucleic acid; and (b) detecting the absence or presence of allele-specific hybridization. In one embodiment, the nucleotide variation is a nucleotide change selected from FIGS. 1-3. In another embodiment, the nucleotide variation is a somatic mutation. In another embodiment, the nucleotide variation is a germline polymorphism.

[0013] In another aspect, a method of amplifying a nucleic acid comprising a nucleotide variation at a nucleotide position selected from FIGS. 1-3 is provided, the method comprising (a) contacting the nucleic acid with a primer that hybridizes to the nucleic acid at a sequence 3′ of the nucleotide variation, and (b) extending the primer to generate an amplification product comprising the nucleotide variation. In one embodiment, the nucleotide variation is a nucleotide change selected from FIGS. 1-3. In another embodiment, the nucleotide variation is a somatic mutation. In another embodiment, the nucleotide variation is a germline polymorphism.

[0014] In another embodiment, a method of determining the genotype of a biological sample from a mammal is provided, the method comprising detecting the absence or presence of a nucleotide variation at a nucleotide position selected from FIGS. 1-3 in nucleic acid material derived from the biological sample. In one embodiment, the nucleotide variation is a nucleotide change selected from FIGS. 1-3. In another embodiment, the biological sample is suspected of comprising tumor cells. In another embodiment, the biological sample is a tumor. In one such embodiment, the tumor is a lung tumor. In one such embodiment, the lung tumor is a non-small cell lung carcinoma. In another embodiment, the detecting comprises carrying out a process selected from a primer extension assay; an allele-specific primer extension assay; an allele-specific nucleotide incorporation assay; an allele-specific oligonucleotide hybridization assay; a 5′ nuclease assay; an assay employing molecular beacons; and an oligonucleotide ligation assay. In another embodiment, the nucleotide variation is a somatic mutation. In another embodiment, the nucleotide variation is a germline polymorphism.

[0015] In another aspect, a method of classifying a tumor in a mammal is provided, the method comprising detecting the presence of a variation in a PRO or PRO polynucleotide in a biological sample derived from the mammal, wherein the biological sample is known to or suspected of comprising tumor cells. In one embodiment, the tumor cells are lung tumor cells. In one such embodiment, the lung tumor cells are non-small cell lung carcinoma cells. In another embodiment, the variation is a nucleotide variation. In one such embodiment, the nucleotide variation is at a nucleotide position selected from FIGS. 1-3. In another such embodiment, the nucleotide variation is a nucleotide change selected from FIGS. 1-3. In another such embodiment, the detecting comprises carrying out a process selected from a primer extension assay; an allele-specific primer extension assay; an allele-specific nucleotide incorporation assay; an allele-specific oligonucleotide hybridization assay; a 5′ nuclease assay; an assay employing molecular beacons; and an oligonucleotide ligation assay. In another such embodiment, the nucleotide variation is a somatic mutation. In another such embodiment, the nucleotide variation is a germline polymorphism. In another embodiment, the variation is an amino acid variation. In one such embodiment, the amino acid variation is in a PRO functional domain selected from FIG. 1 or 3. In another such embodiment, the amino acid variation is at an amino acid position selected from FIG. 1 or 3. In another such embodiment, the amino acid variation is an amino acid change selected from FIG. 1 or 3. In another embodiment, the variation is an amino acid variation in FBXW7. In one such embodiment, the amino acid variation in FBXW7 is in the WD40 domain. In one such embodiment, the amino acid variation is at an amino acid position selected from G343, R399, and Y429. In another embodiment, the variation is a nucleotide variation in an FBXW7 polynucleotide. In one such embodiment, the nucleotide variation is in a region of an FBXW7 polynucleotide encoding the WD40 domain. In one such embodiment, the nucleotide variation is at a nucleotide position selected from C153607116, C153604971, and T153604881 of chromosome 4. In one such embodiment, the nucleotide variation is a nucleotide change selected from C153607116T, C153604971T, and T153604881A.

[0016] In another aspect, a method for predicting whether a tumor will respond to a therapeutic agent that targets a PRO or a PRO polynucleotide is provided, the method comprising determining whether the tumor comprises a variation in a PRO or PRO polynucleotide, wherein the presence of a variation indicates that the tumor will respond to the therapeutic agent. In one embodiment, the tumor is a lung tumor. In one such embodiment, the lung tumor is a non-small cell lung carcinoma. In another embodiment, the variation is a nucleotide variation. In one such embodiment, the nucleotide variation is at a nucleotide position selected from FIGS. 1-3. In another such embodiment, the nucleotide variation is a nucleotide change selected from FIGS. 1-3. In another such embodiment, the nucleotide variation is a somatic mutation. In another such embodiment, the nucleotide variation is a germline polymorphism. In another embodiment, the variation is an amino acid variation. In one such embodiment, the amino acid variation is in a PRO functional domain selected from FIG. 1 or 3. In another such embodiment, the amino acid variation is at an amino acid position selected from FIG. 1 or 3. In another such embodiment, the amino acid variation is an amino acid change selected from FIG. 1 or 3.

[0017] These and further embodiments are described in the following written description.

### BRIEF DESCRIPTION OF THE FIGURES

[0018] FIG. 1 is a table of nucleotide variations in the coding regions of selected genes. The resulting amino acid variations are also provided. The nucleotide variations were identified in nucleic acid derived from lung tumors by mismatch repair detection (MRD), as described in Example A.

[0019] FIG. 2 is a table of nucleotide variations that affect the splicing of mRNA transcribed from selected genes. The nucleotide variations were identified in nucleic acid derived from lung tumors using mismatch repair detection (MRD), as described in Example A.

[0020] FIG. 3 is a table of nucleotide variations in the coding regions of selected genes. The resulting amino acid variations are also provided. The nucleotide variations were identified in nucleic acid derived from lung tumors using Sanger sequencing, as described in Example B.

### DETAILED DESCRIPTION OF EMBODIMENTS

### I. Definitions

[0021] For purposes of interpreting this specification, the following definitions will apply and whenever appropriate, terms used in the singular will also include the plural and vice versa. In the event that any definition set forth below conflicts with any document incorporated herein by reference, the definition set forth below shall control.

[0022] The term “polynucleotide” or “nucleic acid,” as used interchangeably herein, refers to polymers of nucleotides of any length, and include DNA and RNA. The nucleotides can be deoxyribonucleotides, ribonucleotides, modified nucleotides or bases, and/or their analogs, or any substrate that can be incorporated into a polymer by DNA or RNA polymerase. A polynucleotide may comprise modified nucleotides, such as methylated nucleotides and their analogs. If present, modification to the nucleotide structure may be imparted before or after assembly of the polymer. The sequence of nucleotides may be interrupted by non-nucleotide components. A polynucleotide may be further modified after polymerization, such as by conjugation with a labeling component. Other types of modifications include, for example, “caps”, substitution of one or more of the naturally occurring nucleotides with an analog, internucleotide modifications such as, for example, those with uncharged linkages (e.g., methyl phosphonates, phosphotriesters, phosphoamidates, cabamates, etc.) and with charged linkages (e.g., phosphorothioates, phosphorodithioates, etc.), those containing pendant moieties, such as, for example, proteins (e.g., nucleases, toxins, antibodies, signal peptides, poly-L-lysine, etc.), those with intercalators (e.g., acridine, psoralen, etc.), those containing chelators (e.g., metals, radioactive metals, boron, oxidative metals, etc.), those containing alkylators, those with modified linkages (e.g., alpha anomeric nucleic acids, etc.), as well as unmodified forms of the polynucleotide(s). Further, any of the hydroxyl groups ordinarily present in the sugars may be replaced, for example, by phosphonate groups, phosphate groups, protected by standard protecting groups, or activated to prepare additional linkages to additional nucleotides, or may be conjugated to solid supports. The 5′ and 3′ terminal OH can be phosphorylated or substituted with amines or organic capping groups moieties of from 1 to 20 carbon atoms. Other hydroxyls may also be derivatized to standard protecting groups. Polynucleotides can also contain analogous forms of ribose or deoxyribose sugars that are generally known in the art, including, for example, 2′-O-methyl-2′-O— allyl, 2′-fluoro- or 2′-azido-ribose, carbocyclic sugar analogs, α-anomeric sugars, epimeric sugars such as arabinose, xyloses or lyxoses, pyranose sugars, furanose sugars, sedoheptuloses, acyclic analogs and a basic nucleoside analogs such as methyl riboside. One or more phosphodiester linkages may be replaced by alternative linking groups. These alternative linking groups include, but are not limited to, embodiments wherein phosphate is replaced by P(O)S(“thioate”), P(S)S (“dithioate”), “(O)NR 2 (“amidate”), P(O)R, P(O)OR′, CO or CH 2 (“formacetal”), in which each R or R′ is independently H or substituted or unsubstituted alkyl (1-20 C) optionally containing an ether (—O—) linkage, aryl, alkenyl, cycloalkyl, cycloalkenyl or araldyl. Not all linkages in a polynucleotide need be identical. The preceding description applies to all polynucleotides referred to herein, including RNA and DNA.

[0023] “Oligonucleotide,” as used herein, refers to short, single stranded polynucleotides that are at least about seven nucleotides in length and less than about 250 nucleotides in length. Oligonucleotides may be synthetic. The terms “oligonucleotide” and “polynucleotide” are not mutually exclusive. The description above for polynucleotides is equally and fully applicable to oligonucleotides.

[0024] The term “primer” refers to a single stranded polynucleotide that is capable of hybridizing to a nucleic acid and allowing the polymerization of a complementary nucleic acid, generally by providing a free 3′-OH group.

[0025] The term “PRO” refers to a protein encoded by any of the genes listed in FIGS. 1-3, including wild-type and variant forms thereof. Such forms include “full-length,” unprocessed forms of PRO; forms of PRO that result from cellular processing; naturally occurring PRO variants, e.g., PRO resulting from alternative splicing, allelic variations, or spontaneous mutation; and fragments or variants of a native PRO that maintain at least one biological activity of PRO, unless otherwise indicated.

[0026] The term “PRO polynucleotide” or “nucleic acid encoding PRO” refers to a gene or coding sequence (e.g., an mRNA or cDNA coding sequence) that encodes a PRO, unless otherwise indicated.

[0027] The term “nucleotide variation” refers to a change in a nucleotide sequence (e.g., an insertion, deletion, inversion, or substitution of one or more nucleotides, such as a single nucleotide polymorphism (SNP)) relative to a reference sequence (e.g., a wild type sequence). The term also encompasses the corresponding change in the complement of the nucleotide sequence, unless otherwise indicated. A nucleotide variation may be a somatic mutation or a germline polymorphism.

[0028] The term “amino acid variation” refers to a change in an amino acid sequence (e.g., an insertion, substitution, or deletion of one or more amino acids, such as an internal deletion or an N- or C-terminal truncation) relative to a reference sequence.

[0029] The term “variation” refers to either a nucleotide variation or an amino acid variation.

[0030] The term “a nucleotide variation at a nucleotide position selected from Figure(s) ###” and grammatical variants thereof (where “Figure(s) ###” refers to any of FIGS. 1-3) refer to a nucleotide variation in a PRO polynucleotide sequence at any of the nucleotide positions listed in column 5 of any of FIGS. 1-3, including but not limited to the specific nucleotide changes listed in column 5 of any of FIGS. 1-3. For example and for purposes of illustration, with reference to column 5 in the first row of FIG. 1, a nucleotide variation at nucleotide position 130790136 of an ABL polynucleotide encompasses any change at that nucleotide position, including but not limited to the specific nucleotide change, i.e., the G/T substitution, indicated in column 5. The term also encompasses the corresponding change in the complement of the nucleotide sequence, unless otherwise indicated.

[0031] The term “a nucleotide change selected from Figure(s) ###” and grammatical variants thereof (where “Figure(s) ###” refers to any of FIGS. 1-3) refer to any of the specific nucleotide changes listed in column 5 of any of FIGS. 1-3. For purposes of illustration, an example of a nucleotide change selected from FIG. 1 is the G/T substitution at nucleotide position 130790136 of an ABL polynucleotide, as shown in column 5 in the first row of FIG. 1.

[0032] The term “an amino acid variation at an amino acid position selected from Figure(s) ###” and grammatical variants thereof (where “Figure(s) ###” refers to FIG. 1 or 3) refer to an amino acid variation in a PRO amino acid sequence at any of the amino acid positions listed in column 6 of FIG. 1 or 3, including but not limited to the specific amino acid changes listed in column 6 of FIG. 1 or 3. For example and for purposes of illustration, with reference to column 6 in the first row of FIG. 1, an amino acid variation at amino acid position 969 of ABL encompasses any change at that amino acid position, including but not limited to the specific amino acid change, i.e., the A>S substitution, indicated in column 6

[0033] The term “an amino acid change selected from Figure(s) ###” and grammatical variants thereof (where “Figure(s) ###” refers to FIG. 1 or 3) refer to any of the specific amino acid changes listed in column 6 of FIG. 1 or 3. For purposes of illustration, an example of an amino acid change selected from FIG. 1 is the A>S substitution at amino acid position 969 of ABL, as shown in column 6 in the first row of FIG. 1.

[0034] The term “PRO functional domain” refers to any of the protein domains listed in any of FIGS. 1-3.

[0035] The term “activating variation” refers to a variation in a gene or coding sequence that results in a more active form of the encoded polypeptide, relative to the wild type polypeptide.

[0036] The term “array” or “microarray” refers to an ordered arrangement of hybridizable array elements, preferably polynucleotide probes (e.g., oligonucleotides), on a substrate. The substrate can be a solid substrate, such as a glass slide, or a semi-solid substrate, such as nitrocellulose membrane.

[0037] The term “amplification” refers to the process of producing one or more copies of a reference nucleic acid sequence or its complement. Amplification may be linear or exponential (e.g., PCR). A “copy” does not necessarily mean perfect sequence complementarity or identity relative to the template sequence. For example, copies can include nucleotide analogs such as deoxyinosine, intentional sequence alterations (such as sequence alterations introduced through a primer comprising a sequence that is hybridizable, but not fully complementary, to the template), and/or sequence errors that occur during amplification.

[0038] The term “allele-specific oligonucleotide” refers to an oligonucleotide that hybridizes to a region of a target nucleic acid that comprises a nucleotide variation (generally a substitution). “Allele-specific hybridization” means that, when an allele-specific oligonucleotide is hybridized to its target nucleic acid, a nucleotide in the allele-specific oligonucleotide specifically base pairs with the nucleotide variation. An allele-specific oligonucleotide capable of allele-specific hybridization with respect to a particular nucleotide variation is said to be “specific for” that variation.

[0039] The term “allele-specific primer” refers to an allele-specific oligonucleotide that is a primer.

[0040] The term “primer extension assay” refers to an assay in which nucleotides are added to a nucleic acid, resulting in a longer nucleic acid, or “extension product,” that is detected directly or indirectly.

[0041] The term “allele-specific nucleotide incorporation assay” refers to a primer extension assay in which a primer is (a) hybridized to target nucleic acid at a region that is 3′ of a nucleotide variation and (b) extended by a polymerase, thereby incorporating into the extension product a nucleotide that is complementary to the nucleotide variation.

[0042] The term “allele-specific primer extension assay” refers to a primer extension assay in which an allele-specific primer is hybridized to a target nucleic acid and extended.

[0043] The term “allele-specific oligonucleotide hybridization assay” refers to an assay in which (a) an allele-specific oligonucleotide is hybridized to a target nucleic acid and (b) hybridization is detected directly or indirectly.

[0044] The term “5′nuclease assay” refers to an assay in which hybridization of an allele-specific oligonucleotide to a target nucleic acid allows for nucleolytic cleavage of the hybridized probe, resulting in a detectable signal.

[0045] The term “assay employing molecular beacons” refers to an assay in which hybridization of an allele-specific oligonucleotide to a target nucleic acid results in a level of detectable signal that is higher than the level of detectable signal emitted by the free oligonucleotide.

[0046] The term “oligonucleotide ligation assay” refers to an assay in which an allele-specific oligonucleotide and a second oligonucleotide are hybridized adjacent to one another on a target nucleic acid and ligated together (either directly or indirectly through intervening nucleotides), and the ligation product is detected directly or indirectly.

[0047] The term “target sequence,” “target nucleic acid,” or “target nucleic acid sequence” refers generally to a polynucleotide sequence of interest in which a nucleotide variation is suspected or known to reside, including copies of such target nucleic acid generated by amplification.

[0048] The term “detection” includes any means of detecting, including direct and indirect detection.

[0049] The term “diagnosis” is used herein to refer to the identification or classification of a molecular or pathological state, disease or condition. For example, “diagnosis” may refer to identification of a particular type of cancer, e.g., a lung cancer. “Diagnosis” may also refer to the classification of a particular type of cancer, e.g., by histology (e.g., a non small cell lung carcinoma), by molecular features (e.g., a lung cancer characterized by nucleotide or amino acid variation(s) in a particular gene or protein), or both.

[0050] The term “prognosis” is used herein to refer to the prediction of the likelihood of cancer-attributable death or progression, including, for example, recurrence, metastatic spread, and drug resistance, of a neoplastic disease, such as cancer.

[0051] The term “prediction” is used herein to refer to the likelihood that a patient will respond either favorably or unfavorably to a drug or set of drugs. In one embodiment, the prediction relates to the extent of those responses. In another embodiment, the prediction relates to whether and/or the probability that a patient will survive following treatment, for example treatment with a particular therapeutic agent and/or surgical removal of the primary tumor, and/or chemotherapy for a certain period of time without cancer recurrence. The predictive methods of the invention can be used clinically to make treatment decisions by choosing the most appropriate treatment modalities for any particular patient. The predictive methods of the present invention are valuable tools in predicting if a patient is likely to respond favorably to a treatment regimen, such as a given therapeutic regimen, including for example, administration of a given therapeutic agent or combination, surgical intervention, chemotherapy, etc., or whether long-term survival of the patient, following a therapeutic regimen is likely.

[0052] The terms “cell proliferative disorder” and “proliferative disorder” refer to disorders that are associated with a measurable degree of abnormal cell proliferation. In one embodiment, the cell proliferative disorder is cancer.

[0053] “Tumor,” as used herein, refers to all neoplastic cell growth and proliferation, whether malignant or benign, and all pre-cancerous and cancerous cells and tissues. The terms “cancer,” “cancerous,” “cell proliferative disorder,” “proliferative disorder” and “tumor” are not mutually exclusive as referred to herein.

[0054] The terms “cancer” and “cancerous” refer to or describe the physiological condition in mammals that is typically characterized by unregulated cell growth and proliferation. Examples of cancer include, but are not limited to, carcinoma, lymphoma (e.g., Hodgkin's and non-Hodgkin's lymphoma), blastoma, sarcoma, and leukemia. More particular examples of cancers include squamous cell cancer, small-cell lung cancer, non-small cell lung cancer, adenocarcinoma of the lung, squamous carcinoma of the lung, cancer of the peritoneum, hepatocellular cancer, renal cell carcinoma, gastrointestinal cancer, gastric cancer, esophageal cancer, pancreatic cancer, glioma, cervical cancer, ovarian cancer, liver cancer, bladder cancer, hepatoma, breast cancer, colon cancer, rectal cancer, lung cancer, endometrial or uterine carcinoma, salivary gland carcinoma, kidney cancer, liver cancer, prostate cancer, vulval cancer, thyroid cancer, hepatic carcinoma, melanoma, leukemia and other lymphoproliferative disorders, and various types of head and neck cancer.

[0055] The term “lung tumor” refers to any tumor of the lung, including but not limited to small-cell lung carcinoma and non-small cell lung carcinoma, the latter including but not limited to adenocarcinoma, squamous carcinoma, and large cell carcinoma.

[0056] The term “neoplasm” or “neoplastic cell” refers to an abnormal tissue or cell that proliferates more rapidly than corresponding normal tissues or cells and continues to grow after removal of the stimulus that initiated the growth.

[0057] A “lung tumor cell” refers to a lung tumor cell, either in vivo or in vitro, and encompasses cell lines derived from lung tumor cells.

[0058] As used herein, “treatment” (and variations such as “treat” or “treating”) refers to clinical intervention in an attempt to alter the natural course of the individual or cell being treated, and can be performed either for prophylaxis or during the course of clinical pathology. Desirable effects of treatment include preventing occurrence or recurrence of disease, alleviation of symptoms, diminishment of any direct or indirect pathological consequences of the disease, preventing metastasis, decreasing the rate of disease progression, amelioration or palliation of the disease state, and remission or improved prognosis.

[0059] An “individual” is a vertebrate. In certain embodiments, the vertebrate is a mammal Mammals include, but are not limited to, farm animals (such as cows), sport animals, pets (such as cats, dogs, and horses), primates (including human and non-human primates), and rodents (e.g., mice and rats). In certain embodiments, a mammal is a human.

[0060] An “effective amount” refers to an amount effective, at dosages and for periods of time necessary, to achieve the desired therapeutic or prophylactic result.

[0061] A “therapeutically effective amount” of a substance/molecule of the invention may vary according to factors such as the disease state, age, sex, and weight of the individual, and the ability of the substance/molecule, to elicit a desired response in the individual. A therapeutically effective amount encompasses an amount in which any toxic or detrimental effects of the substance/molecule are outweighed by the therapeutically beneficial effects. A “prophylactically effective amount” refers to an amount effective, at dosages and for periods of time necessary, to achieve the desired prophylactic result. Typically, but not necessarily, since a prophylactic dose is used in subjects prior to or at an earlier stage of disease, the prophylactically effective amount would be less than the therapeutically effective amount.

[0062] The term “long-term” survival is used herein to refer to survival for at least 1 year, 5 years, 8 years, or 10 years following therapeutic treatment.

[0063] The term “increased resistance” to a particular therapeutic agent or treatment option, when used in accordance with the invention, means decreased response to a standard dose of the drug or to a standard treatment protocol.

[0064] The term “decreased sensitivity” to a particular therapeutic agent or treatment option, when used in accordance with the invention, means decreased response to a standard dose of the agent or to a standard treatment protocol, where decreased response can be compensated for (at least partially) by increasing the dose of agent, or the intensity of treatment.

[0065] “Patient response” can be assessed using any endpoint indicating a benefit to the patient, including, without limitation, (1) inhibition, to some extent, of tumor growth, including slowing down or complete growth arrest; (2) reduction in the number of tumor cells; (3) reduction in tumor size; (4) inhibition (i.e., reduction, slowing down or complete stopping) of tumor cell infiltration into adjacent peripheral organs and/or tissues; (5) inhibition (i.e. reduction, slowing down or complete stopping) of metastasis; (6) enhancement of anti-tumor immune response, which may, but does not have to, result in the regression or rejection of the tumor; (7) relief, to some extent, of one or more symptoms associated with the tumor; (8) increase in the length of survival following treatment; and/or (9) decreased mortality at a given point of time following treatment.

[0066] The term “antagonist” is used in the broadest sense, and includes any molecule that partially or fully inhibits or neutralizes a biological activity of a polypeptide, such as PRO, or that partially or fully inhibits the transcription or translation of a nucleic acid encoding the polypeptide. Exemplary antagonist molecules include, but are not limited to, antagonist antibodies, polypeptide fragments, oligopeptides, organic molecules (including small molecules), and anti-sense nucleic acids.

[0067] The term “agonist” is used in the broadest sense, and includes any molecule that partially or fully mimics a biological activity of a polypeptide, such as PRO, or that increases the transcription or translation of a nucleic acid encoding the polypeptide. Exemplary agonist molecules include, but are not limited to, agonist antibodies, polypeptide fragments, oligopeptides, organic molecules (including small molecules), PRO polynucleotides, PRO polypeptides, and PRO-Fc fusions.

[0068] A “therapeutic agent that targets a PRO or a PRO polynucleotide” means any agent that affects the expression and/or activity of PRO or a PRO polynucleotide including, but not limited to, any of the PRO agonists or antagonists described herein, including such therapeutic agents that are already known in the art as well as those that are later developed.

[0069] The term “cytotoxic agent” as used herein refers to a substance that inhibits or prevents a cellular function and/or causes cell death or destruction. The term is intended to include radioactive isotopes (e.g., At²¹¹, I¹³¹, I¹²⁵, Y⁹⁰, Re¹⁸⁶, Re¹⁸⁸, Sm¹⁵³, Bi²¹², P³², Pb²¹² and radioactive isotopes of Lu), chemotherapeutic agents (e.g., methotrexate, adriamicin, vinca alkaloids (vincristine, vinblastine, etoposide), doxorubicin, melphalan, mitomycin C, chlorambucil, daunorubicin or other intercalating agents, enzymes and fragments thereof such as nucleolytic enzymes, antibiotics, and toxins such as small molecule toxins or enzymatically active toxins of bacterial, fungal, plant or animal origin, including fragments and/or variants thereof, and the various antitumor or anticancer agents disclosed below. Other cytotoxic agents are described below. A “tumoricidal” agent causes destruction of tumor cells.

[0070] A “toxin” is any substance capable of having a detrimental effect on the growth or proliferation of a cell.

[0071] A “chemotherapeutic agent” is a chemical compound useful in the treatment of cancer. Examples of chemotherapeutic agents include alkylating agents such as thiotepa and CYTOXAN® cyclosphosphamide; alkyl sulfonates such as busulfan, improsulfan and piposulfan; aziridines such as benzodopa, carboquone, meturedopa, and uredopa; ethylenimines and methylamelamines including altretamine, triethylenemelamine, trietylenephosphoramide, triethylenethiophosphaoramide and trimethylolomelamine; acetogenins (especially bullatacin and bullatacinone); delta-9-tetrahydrocannabinol (dronabinol, MARINOL®); beta-lapachone; lapachol; colchicines; betulinic acid; a camptothecin (including the synthetic analogue topotecan (HYCAMTIN®), CPT-11 (irinotecan, CAMPTOSAR®), acetylcamptothecin, scopolectin, and 9-aminocamptothecin); bryostatin; callystatin; CC-1065 (including its adozelesin, carzelesin and bizelesin synthetic analogues); podophyllotoxin; podophyllinic acid; teniposide; cryptophycins (particularly cryptophycin 1 and cryptophycin 8); dolastatin; duocarmycin (including the synthetic analogues, KW-2189 and CB1-TM1); eleutherobin; pancratistatin; a sarcodictyin; spongistatin; nitrogen mustards such as chlorambucil, chlornaphazine, cholophosphamide, estramustine, ifosfamide, mechlorethamine, mechlorethamine oxide hydrochloride, melphalan, novembichin, phenesterine, prednimustine, trofosfamide, uracil mustard; nitrosoureas such as carmustine, chlorozotocin, fotemustine, lomustine, nimustine, and ranimnustine; antibiotics such as the enediyne antibiotics (e.g., calicheamicin, especially calicheamicin gamma1I and calicheamicin omegaI1 (see, e.g., Agnew, Chem. Intl. Ed. Engl., 33: 183-186 (1994)); dynemicin, including dynemicin A; an esperamicin; as well as neocarzinostatin chromophore and related chromoprotein enediyne antiobiotic chromophores), aclacinomysins, actinomycin, authramycin, azaserine, bleomycins, cactinomycin, carabicin, carminomycin, carzinophilin, chromomycins, dactinomycin, daunorubicin, detorubicin, 6-diazo-5-oxo-L-norleucine, ADRIAMYCIN® doxorubicin (including morpholino-doxorubicin, cyanomorpholino-doxorubicin, 2-pyrrolino-doxorubicin and deoxydoxorubicin), epirubicin, esorubicin, idarubicin, marcellomycin, mitomycins such as mitomycin C, mycophenolic acid, nogalamycin, olivomycins, peplomycin, porfiromycin, puromycin, quelamycin, rodorubicin, streptonigrin, streptozocin, tubercidin, ubenimex, zinostatin, zorubicin; anti-metabolites such as methotrexate and 5-fluorouracil (5-FU); folic acid analogues such as denopterin, methotrexate, pteropterin, trimetrexate; purine analogs such as fludarabine, 6-mercaptopurine, thiamiprine, thioguanine; pyrimidine analogs such as ancitabine, azacitidine, 6-azauridine, carmofur, cytarabine, dideoxyuridine, doxifluridine, enocitabine, floxuridine; androgens such as calusterone, dromostanolone propionate, epitiostanol, mepitiostane, testolactone; anti-adrenals such as aminoglutethimide, mitotane, trilostane; folic acid replenisher such as frolinic acid; aceglatone; aldophosphamide glycoside; aminolevulinic acid; eniluracil; amsacrine; bestrabucil; bisantrene; edatraxate; defofamine; demecolcine; diaziquone; elformithine; elliptinium acetate; an epothilone; etoglucid; gallium nitrate; hydroxyurea; lentinan; lonidainine; maytansinoids such as maytansine and ansamitocins; mitoguazone; mitoxantrone; mopidanmol; nitraerine; pentostatin; phenamet; pirarubicin; losoxantrone; 2-ethylhydrazide; procarbazine; PSK® polysaccharide complex (JHS Natural Products, Eugene, Oreg.); razoxane; rhizoxin; sizofuran; spirogermanium; tenuazonic acid; triaziquone; 2,2′,2″-trichlorotriethylamine; trichothecenes (especially T-2 toxin, verracurin A, roridin A and anguidine); urethan; vindesine (ELDISINE®, FILDESIN®); dacarbazine; mannomustine; mitobronitol; mitolactol; pipobroman; gacytosine; arabinoside (“Ara-C”); thiotepa; taxoids, e.g., TAXOL® paclitaxel (Bristol-Myers Squibb Oncology, Princeton, N.J.), ABRAXANE™ Cremophor-free, albumin-engineered nanoparticle formulation of paclitaxel (American Pharmaceutical Partners, Schaumberg, Ill.), and TAXOTERE® docetaxel (Rhone-Poulenc Rorer, Antony, France); chloranbucil; gemcitabine (GEMZAR®); 6-thioguanine; mercaptopurine; methotrexate; platinum analogs such as cisplatin and carboplatin; vinblastine (VELBAN®); platinum; etoposide (VP-16); ifosfamide; mitoxantrone; vincristine (ONCOVIN®); oxaliplatin; leucovovin; vinorelbine (NAVELBINE®); novantrone; edatrexate; daunomycin; aminopterin; ibandronate; topoisomerase inhibitor RFS 2000; difluoromethylornithine (DMFO); retinoids such as retinoic acid; capecitabine (XELODA®); pharmaceutically acceptable salts, acids or derivatives of any of the above; as well as combinations of two or more of the above such as CHOP, an abbreviation for a combined therapy of cyclophosphamide, doxorubicin, vincristine, and prednisolone, and FOLFOX, an abbreviation for a treatment regimen with oxaliplatin (ELOXATIN™) combined with 5-FU and leucovovin.

[0072] Also included in this definition are anti-hormonal agents that act to regulate, reduce, block, or inhibit the effects of hormones that can promote the growth of cancer, and are often in the form of systemic, or whole-body treatment. They may be hormones themselves. Examples include anti-estrogens and selective estrogen receptor modulators (SERMs), including, for example, tamoxifen (including NOLVADEX® tamoxifen), EVISTA® raloxifene, droloxifene, 4-hydroxytamoxifen, trioxifene, keoxifene, LY117018, onapristone, and FARESTON® toremifene; anti-progesterones; estrogen receptor down-regulators (ERDs); agents that function to suppress or shut down the ovaries, for example, leutinizing hormone-releasing hormone (LHRH) agonists such as LUPRON® and ELIGARD® leuprolide acetate, goserelin acetate, buserelin acetate and tripterelin; other anti-androgens such as flutamide, nilutamide and bicalutamide; and aromatase inhibitors that inhibit the enzyme aromatase, which regulates estrogen production in the adrenal glands, such as, for example, 4(5)-imidazoles, aminoglutethimide, MEGASE® megestrol acetate, AROMASIN® exemestane, formestanie, fadrozole, RIVISOR® vorozole, FEMARA® letrozole, and ARIMIDEX® anastrozole. In addition, such definition of chemotherapeutic agents includes bisphosphonates such as clodronate (for example, BONEFOS® or OSTAC®), DIDROCAL® etidronate, NE-58095, ZOMETA® zoledronic acid/zoledronate, FOSAMAX® alendronate, AREDIA® pamidronate, SKELID® tiludronate, or ACTONEL® risedronate; as well as troxacitabine (a 1,3-dioxolane nucleoside cytosine analog); antisense oligonucleotides, particularly those that inhibit expression of genes in signaling pathways implicated in abherant cell proliferation, such as, for example, PKC-alpha, Raf, H-Ras, and epidermal growth factor receptor (EGF-R); vaccines such as THERATOPE® vaccine and gene therapy vaccines, for example, ALLOVECTIN® vaccine, LEUVECTIN® vaccine, and VAXID® vaccine; LURTOTECAN® topoisomerase 1 inhibitor; ABARELIX® rmRH; lapatinib ditosylate (an ErbB-2 and EGFR dual tyrosine kinase small-molecule inhibitor also known as GW572016); and pharmaceutically acceptable salts, acids or derivatives of any of the above.

[0073] A “growth inhibitory agent” when used herein refers to a compound or composition which inhibits growth of a cell (such as a cell expressing PRO) either in vitro or in vivo. Thus, the growth inhibitory agent may be one which significantly reduces the percentage of cells (such as a cell expressing PRO) in S phase. Examples of growth inhibitory agents include agents that block cell cycle progression (at a place other than S phase), such as agents that induce G1 arrest and M-phase arrest. Classical M-phase blockers include the vincas (vincristine and vinblastine), taxanes, and topoisomerase II inhibitors such as doxorubicin, epirubicin, daunorubicin, etoposide, and bleomycin. Those agents that arrest G1 also spill over into S-phase arrest, for example, DNA alkylating agents such as tamoxifen, prednisone, dacarbazine, mechlorethamine, cisplatin, methotrexate, 5-fluorouracil, and ara-C. Further information can be found in The Molecular Basis of Cancer, Mendelsohn and Israel, eds., Chapter 1, entitled “Cell cycle regulation, oncogenes, and antineoplastic drugs” by Murakami et al. (WB Saunders: Philadelphia, 1995), especially p. 13. The taxanes (paclitaxel and docetaxel) are anticancer drugs both derived from the yew tree. Docetaxel (TAXOTERE®, Rhone-Poulenc Rorer), derived from the European yew, is a semisynthetic analogue of paclitaxel (TAXOL®, Bristol-Myers Squibb). Paclitaxel and docetaxel promote the assembly of microtubules from tubulin dimers and stabilize microtubules by preventing depolymerization, which results in the inhibition of mitosis in cells.

[0074] As used herein, the term “EGFR inhibitor” refers to compounds that bind to or otherwise interact directly with EGFR and prevent or reduce its signaling activity, and is alternatively referred to as an “EGFR antagonist.” Examples of such agents include antibodies and small molecules that bind to EGFR. Examples of antibodies which bind to EGFR include MAb 579 (ATCC CRL HB 8506), MAb 455 (ATCC CRL HB8507), MAb 225 (ATCC CRL 8508), MAb 528 (ATCC CRL 8509) (see, U.S. Pat. No. 4,943,533, Mendelsohn et al.) and variants thereof, such as chimerized 225 (C225 or Cetuximab; ERBUTIX®) and reshaped human 225 (H225) (see, WO 96/40210, Imclone Systems Inc.); IMC-11F8, a fully human, EGFR-targeted antibody (Imclone); antibodies that bind type II mutant EGFR (U.S. Pat. No. 5,212,290); humanized and chimeric antibodies that bind EGFR as described in U.S. Pat. No. 5,891,996; and human antibodies that bind EGFR, such as ABX-EGF or Panitumumab (see WO98/50433, Abgenix/Amgen); EMD 55900 (Stragliotto et al. Eur. J. Cancer 32A:636-640 (1996)); EMD7200 (matuzumab) a humanized EGFR antibody directed against EGFR that competes with both EGF and TGF-alpha for EGFR binding (EMD/Merck); human EGFR antibody, HuMax-EGFR (GenMab); fully human antibodies known as E1.1, E2.4, E2.5, E6.2, E6.4, E2.11, E6. 3 and E7.6. 3 and described in U.S. Pat. No. 6,235,883; MDX-447 (Medarex Inc); and mAb 806 or humanized mAb 806 (Johns et al., J. Biol. Chem. 279(29):30375-30384 (2004)). The anti-EGFR antibody may be conjugated with a cytotoxic agent, thus generating an immunoconjugate (see, e.g., EP659,439A2, Merck Patent GmbH). EGFR antagonists include small molecules such as compounds described in U.S. Pat. Nos. 5,616,582, 5,457,105, 5,475,001, 5,654,307, 5,679,683, 6,084,095, 6,265,410, 6,455,534, 6,521,620, 6,596,726, 6,713,484, 5,770,599, 6,140,332, 5,866,572, 6,399,602, 6,344,459, 6,602,863, 6,391,874, 6,344,455, 5,760,041, 6,002,008, and 5,747,498, as well as the following PCT publications: WO98/14451, WO98/50038, WO99/09016, and WO99/24037. Particular small molecule EGFR antagonists include OSI-774 (CP-358774, erlotinib, TARCEVA® Genentech/OSI Pharmaceuticals); PD 183805 (CI 1033, 2-propenamide, N-[4-[(3-chloro-4-fluorophenyl)amino]-7-[3-(4-morpholinyl)propoxy]-6-quinazolinyl]-, dihydrochloride, Pfizer Inc.); ZD1839, gefitinib (IRESSA™) 4-(3′-Chloro-4′-fluoroanilino)-7-methoxy-6-(3-morpholinopropoxy)quinazoline, AstraZeneca); ZM 105180 ((6-amino-4-(3-methylphenyl-amino)-quinazoline, Zeneca); BIBX-1382 (N8-(3-chloro-4-fluoro-phenyl)-N2-(1-methyl-piperidin-4-yl)-pyrimido[5,4-d]pyrimidine-2,8-diamine, Boehringer Ingelheim); PKI-166 ((R)-4-[4-[(1-phenylethyl)amino]-1H-pyrrolo[2,3-d]pyrimidin-6-yl]-phenol); (R)-6-(4-hydroxyphenyl)-4-[(1-phenylethyl)amino]-7H-pyrrolo[2,3-d]pyrimidine); CL-387785 (N-[4-[(3-bromophenyl)amino]-6-quinazolinyl]-2-butynamide); EKB-569 (N-[4-[(3-chloro-4-fluorophenyl)amino]-3-cyano-7-ethoxy-6-quinolinyl]-4-(dimethylamino)-2-butenamide) (Wyeth); AG1478 (Pfizer); AG1571 (SU 5271; Pfizer); dual EGFR/HER2 tyrosine kinase inhibitors such as lapatinib (TYKERB®, GSK572016 or N-[3-chloro-4-[(3 fluorophenyl)methoxy]phenyl]6[5[[[2-methylsulfonyl)ethyl]amino]methyl]-2-furanyl]-4-quinazolinamine; Glaxo-SmithKline).

[0075] A “tyrosine kinase inhibitor” is a molecule which inhibits tyrosine kinase activity of a tyrosine kinase such as a HER receptor. Examples of such inhibitors include the EGFR-targeted drugs noted in the preceding paragraph; small molecule HER2 tyrosine kinase inhibitor such as TAK165 available from Takeda; CP-724,714, an oral selective inhibitor of the ErbB2 receptor tyrosine kinase (Pfizer and OSI); dual-HER inhibitors such as EKB-569 (available from Wyeth) which preferentially binds EGFR but inhibits both HER2 and EGFR-overexpressing cells; lapatinib (GSK572016; available from Glaxo-SmithKline), an oral HER2 and EGFR tyrosine kinase inhibitor; PKI-166 (available from Novartis); pan-HER inhibitors such as canertinib (CI-1033; Pharmacia); Raf-1 inhibitors such as antisense agent ISIS-5132 available from ISIS Pharmaceuticals which inhibit Raf-1 signaling; non-HER targeted TK inhibitors such as imatinib mesylate (GLEEVEC™, available from Glaxo SmithKline); multi-targeted tyrosine kinase inhibitors such as sunitinib (SUTENT®, available from Pfizer); VEGF receptor tyrosine kinase inhibitors such as vatalanib (PTK787/ZK222584, available from Novartis/Schering AG); MAPK extracellular regulated kinase I inhibitor CI-1040 (available from Pharmacia); quinazolines, such as PD 153035, 4-(3-chloroanilino) quinazoline; pyridopyrimidines; pyrimidopyrimidines; pyrrolopyrimidines, such as CGP 59326, CGP 60261 and CGP 62706; pyrazolopyrimidines, 4-(phenylamino)-7H-pyrrolo[2,3-d]pyrimidines; curcumin (diferuloyl methane, 4,5-bis(4-fluoroanilino)phthalimide); tyrphostines containing nitrothiophene moieties; PD-0183805 (Warner-Lamber); antisense molecules (e.g. those that bind to HER-encoding nucleic acid); quinoxalines (U.S. Pat. No. 5,804,396); tryphostins (U.S. Pat. No. 5,804,396); ZD6474 (Astra Zeneca); PTK-787 (Novartis/Schering AG); pan-HER inhibitors such as CI-1033 (Pfizer); Affinitac (ISIS 3521; Isis/Lilly); imatinib mesylate (GLEEVEC™); PKI 166 (Novartis); GW2016 (Glaxo SmithKline); CI-1033 (Pfizer); EKB-569 (Wyeth); Semaxinib (Pfizer); ZD6474 (AstraZeneca); PTK-787 (Novartis/Schering AG); INC-1C11 (Imclone); or as described in any of the following patent publications: U.S. Pat. No. 5,804,396; WO 1999/09016 (American Cyanamid); WO 1998/43960 (American Cyanamid); WO 1997/38983 (Warner Lambert); WO 1999/06378 (Warner Lambert); WO 1999/06396 (Warner Lambert); WO 1996/30347 (Pfizer, Inc); WO 1996/33978 (Zeneca); WO 1996/3397 (Zeneca); and WO 1996/33980 (Zeneca).

[0076] “Antibodies” (Abs) and “immunoglobulins” (Igs) refer to glycoproteins having similar structural characteristics. While antibodies exhibit binding specificity to a specific antigen, immunoglobulins include both antibodies and other antibody-like molecules which generally lack antigen specificity. Polypeptides of the latter kind are, for example, produced at low levels by the lymph system and at increased levels by myelomas.

[0077] The terms “antibody” and “immunoglobulin” are used interchangeably in the broadest sense and include monoclonal antibodies (e.g., full length or intact monoclonal antibodies), polyclonal antibodies, monovalent antibodies, multivalent antibodies, multispecific antibodies (e.g., bispecific antibodies so long as they exhibit the desired biological activity) and may also include certain antibody fragments (as described in greater detail herein). An antibody can be chimeric, human, humanized and/or affinity matured.

[0078] The term “anti-PRO antibody” or “an antibody that binds to PRO” refers to an antibody that is capable of binding PRO with sufficient affinity such that the antibody is useful as a diagnostic and/or therapeutic agent in targeting PRO. Preferably, the extent of binding of an anti-PRO antibody to an unrelated, non-PRO protein is less than about 10% of the binding of the antibody to PRO as measured, e.g., by a radioimmunoassay (RIA). In certain embodiments, an antibody that binds to PRO has a dissociation constant (Kd) of ≦1 μM, ≦100 nM, ≦10 nM, ≦1 nM, or ≦0.1 nM. In certain embodiments, an anti-PRO antibody binds to an epitope of PRO that is conserved among PRO from different species.

[0079] The terms “full length antibody,” “intact antibody” and “whole antibody” are used herein interchangeably to refer to an antibody in its substantially intact form, not antibody fragments as defined below. The terms particularly refer to an antibody with heavy chains that contain the Fc region.

[0080] “Antibody fragments” comprise a portion of an intact antibody, preferably comprising the antigen binding region thereof. Examples of antibody fragments include Fab, Fab′, F(ab′)₂, and Fv fragments; diabodies; linear antibodies; single-chain antibody molecules; and multispecific antibodies formed from antibody fragments.

[0081] Papain digestion of antibodies produces two identical antigen-binding fragments, called “Fab” fragments, each with a single antigen-binding site, and a residual “Fc” fragment, whose name reflects its ability to crystallize readily. Pepsin treatment yields an F(ab′)₂ fragment that has two antigen-combining sites and is still capable of cross-linking antigen.

[0082] “Fv” is a minimum antibody fragment which contains a complete antigen-binding site. In one embodiment, a two-chain Fv species consists of a dimer of one heavy- and one light-chain variable domain in tight, non-covalent association. Collectively, the six CDRs of an Fv confer antigen-binding specificity to the antibody. However, even a single variable domain (or half of an Fv comprising only three CDRs specific for an antigen) has the ability to recognize and bind antigen, although at a lower affinity than the entire binding site.

[0083] The Fab fragment contains the heavy- and light-chain variable domains and also contains the constant domain of the light chain and the first constant domain (CH1) of the heavy chain. Fab′ fragments differ from Fab fragments by the addition of a few residues at the carboxy terminus of the heavy chain CH1 domain including one or more cysteines from the antibody hinge region. Fab′-SH is the designation herein for Fab′ in which the cysteine residue(s) of the constant domains bear a free thiol group. F(ab′)₂ antibody fragments originally were produced as pairs of Fab′ fragments which have hinge cysteines between them. Other chemical couplings of antibody fragments are also known.

[0084] “Single-chain Fv” or “scFv” antibody fragments comprise the VH and VL domains of antibody, wherein these domains are present in a single polypeptide chain. Generally, the scFv polypeptide further comprises a polypeptide linker between the VH and VL domains which enables the scFv to form the desired structure for antigen binding. For a review of scFv see Pluckthun, in The Pharmacology of Monoclonal Antibodies, vol. 113, Rosenburg and Moore eds., Springer-Verlag, New York, pp. 269-315 (1994).

[0085] The term “diabodies” refers to small antibody fragments with two antigen-binding sites, which fragments comprise a heavy-chain variable domain (VH) connected to a light-chain variable domain (VL) in the same polypeptide chain (VH-VL). By using a linker that is too short to allow pairing between the two domains on the same chain, the domains are forced to pair with the complementary domains of another chain and create two antigen-binding sites. Diabodies may be bivalent or bispecific. Diabodies are described more fully in, for example, EP 404,097; WO93/1161; Hudson et al. (2003) Nat. Med. 9:129-134; and Hollinger et al., Proc. Natl. Acad. Sci. USA 90: 6444-6448 (1993). Triabodies and tetrabodies are also described in Hudson et al. (2003) Nat. Med. 9:129-134.

[0086] The term “monoclonal antibody” as used herein refers to an antibody obtained from a population of substantially homogeneous antibodies, i.e., the individual antibodies comprising the population are identical except for possible mutations, e.g., naturally occurring mutations, that may be present in minor amounts. Thus, the modifier “monoclonal” indicates the character of the antibody as not being a mixture of discrete antibodies. In certain embodiments, such a monoclonal antibody typically includes an antibody comprising a polypeptide sequence that binds a target, wherein the target-binding polypeptide sequence was obtained by a process that includes the selection of a single target binding polypeptide sequence from a plurality of polypeptide sequences. For example, the selection process can be the selection of a unique clone from a plurality of clones, such as a pool of hybridoma clones, phage clones, or recombinant DNA clones. It should be understood that a selected target binding sequence can be further altered, for example, to improve affinity for the target, to humanize the target binding sequence, to improve its production in cell culture, to reduce its immunogenicity in vivo, to create a multispecific antibody, etc., and that an antibody comprising the altered target binding sequence is also a monoclonal antibody of this invention. In contrast to polyclonal antibody preparations which typically include different antibodies directed against different determinants (epitopes), each monoclonal antibody of a monoclonal antibody preparation is directed against a single determinant on an antigen. In addition to their specificity, monoclonal antibody preparations are advantageous in that they are typically uncontaminated by other immunoglobulins.

[0087] The modifier “monoclonal” indicates the character of the antibody as being obtained from a substantially homogeneous population of antibodies, and is not to be construed as requiring production of the antibody by any particular method. For example, the monoclonal antibodies to be used in accordance with the present invention may be made by a variety of techniques, including, for example, the hybridoma method (e.g., Kohler et al., Nature, 256: 495 (1975); Harlow et al., Antibodies: A Laboratory Manual, (Cold Spring Harbor Laboratory Press, 2^{nd} ed. 1988); Hammerling et al., in: Monoclonal Antibodies and T-Cell Hybridomas 563-681 (Elsevier, N.Y., 1981)), recombinant DNA methods (see, e.g., U.S. Pat. No. 4,816,567), phage display technologies (see, e.g., Clackson et al., Nature, 352: 624-628 (1991); Marks et al., J. Mol. Biol. 222: 581-597 (1992); Sidhu et al., J. Mol. Biol. 338(2): 299-310 (2004); Lee et al., J. Mol. Biol. 340(5): 1073-1093 (2004); Fellouse, Proc. Natl. Acad. Sci. USA 101(34): 12467-12472 (2004); and Lee et al., J. Immunol. Methods 284(1-2): 119-132 (2004), and technologies for producing human or human-like antibodies in animals that have parts or all of the human immunoglobulin loci or genes encoding human immunoglobulin sequences (see, e.g., WO98/24893; WO96/34096; WO96/33735; WO91/10741; Jakobovits et al., Proc. Natl. Acad. Sci. USA 90: 2551 (1993); Jakobovits et al., Nature 362: 255-258 (1993); Bruggemann et al., Year in Immunol. 7:33 (1993); U.S. Pat. Nos. 5,545,807; 5,545,806; 5,569,825; 5,625,126; 5,633,425; 5,661,016; Marks et al., Bio. Technology 10: 779-783 (1992); Lonberg et al., Nature 368: 856-859 (1994); Morrison, Nature 368: 812-813 (1994); Fishwild et al., Nature Biotechnol. 14: 845-851 (1996); Neuberger, Nature Biotechnol. 14: 826 (1996) and Lonberg and Huszar, Intern. Rev. Immunol. 13: 65-93 (1995).

[0088] The monoclonal antibodies herein specifically include “chimeric” antibodies in which a portion of the heavy and/or light chain is identical with or homologous to corresponding sequences in antibodies derived from a particular species or belonging to a particular antibody class or subclass, while the remainder of the chain(s) is identical with or homologous to corresponding sequences in antibodies derived from another species or belonging to another antibody class or subclass, as well as fragments of such antibodies, so long as they exhibit the desired biological activity (U.S. Pat. No. 4,816,567; and Morrison et al., Proc. Natl. Acad. Sci. USA 81:6851-6855 (1984)).

[0089] “Humanized” forms of non-human (e.g., murine) antibodies are chimeric antibodies that contain minimal sequence derived from non-human immunoglobulin. In one embodiment, a humanized antibody is a human immunoglobulin (recipient antibody) in which residues from a hypervariable region of the recipient are replaced by residues from a hypervariable region of a non-human species (donor antibody) such as mouse, rat, rabbit, or nonhuman primate having the desired specificity, affinity, and/or capacity. In some instances, framework region (FR) residues of the human immunoglobulin are replaced by corresponding non-human residues. Furthermore, humanized antibodies may comprise residues that are not found in the recipient antibody or in the donor antibody. These modifications may be made to further refine antibody performance. In general, a humanized antibody will comprise substantially all of at least one, and typically two, variable domains, in which all or substantially all of the hypervariable loops correspond to those of a non-human immunoglobulin, and all or substantially all of the FRs are those of a human immunoglobulin sequence. The humanized antibody optionally will also comprise at least a portion of an immunoglobulin constant region (Fc), typically that of a human immunoglobulin. For further details, see Jones et al., Nature 321:522-525 (1986); Riechmann et al., Nature 332:323-329 (1988); and Presta, Curr. Op. Struct. Biol. 2:593-596 (1992). See also the following review articles and references cited therein: Vaswani and Hamilton, Ann. Allergy, Asthma & Immunol. 1:105-115 (1998); Harris, Biochem. Soc. Transactions 23:1035-1038 (1995); Hurle and Gross, Curr. Op. Biotech. 5:428-433 (1994).

[0090] A “human antibody” is one which comprises an amino acid sequence corresponding to that of an antibody produced by a human and/or has been made using any of the techniques for making human antibodies as disclosed herein. Such techniques include screening human-derived combinatorial libraries, such as phage display libraries (see, e.g., Marks et al., J. Mol. Biol., 222: 581-597 (1991) and Hoogenboom et al., Nucl. Acids Res., 19: 4133-4137 (1991)); using human myeloma and mouse-human heteromyeloma cell lines for the production of human monoclonal antibodies (see, e.g., Kozbor J. Immunol., 133: 3001 (1984); Brodeur et al., Monoclonal Antibody Production Techniques and Applications, pp. 51-63 (Marcel Dekker, Inc., New York, 1987); and Boerner et al., J. Immunol., 147: 86 (1991)); and generating monoclonal antibodies in transgenic animals (e.g., mice) that are capable of producing a full repertoire of human antibodies in the absence of endogenous immunoglobulin production (see, e.g., Jakobovits et al., Proc. Natl. Acad. Sci. USA, 90: 2551 (1993); Jakobovits et al., Nature, 362: 255 (1993); Bruggermann et al., Year in Immunol., 7: 33 (1993)). This definition of a human antibody specifically excludes a humanized antibody comprising antigen-binding residues from a non-human animal.

[0091] An “affinity matured” antibody is one with one or more alterations in one or more CDRs thereof which result in an improvement in the affinity of the antibody for antigen, compared to a parent antibody which does not possess those alteration(s). In one embodiment, an affinity matured antibody has nanomolar or even picomolar affinities for the target antigen. Affinity matured antibodies are produced by procedures known in the art. Marks et al. Bio/Technology 10:779-783 (1992) describes affinity maturation by VH and VL domain shuffling. Random mutagenesis of HVR and/or framework residues is described by: Barbas et al. Proc Nat. Acad. Sci. USA 91:3809-3813 (1994); Schier et al. Gene 169:147-155 (1995); Yelton et al. J. Immunol. 155:1994-2004 (1995); Jackson et al., J. Immunol. 154(7):3310-9 (1995); and Hawkins et al, J. Mol. Biol. 226:889-896 (1992).

[0092] A “blocking antibody” or an “antagonist antibody” is one which inhibits or reduces a biological activity of the antigen it binds. Certain blocking antibodies or antagonist antibodies partially or completely inhibit the biological activity of the antigen.

[0093] A “small molecule” or “small organic molecule” is defined herein as an organic molecule having a molecular weight below about 500 Daltons.

[0094] An “PRO-binding oligopeptide” or an “oligopeptide that binds PRO” is an oligopeptide that is capable of binding PRO with sufficient affinity such that the oligopeptide is useful as a diagnostic and/or therapeutic agent in targeting PRO. In certain embodiments, the extent of binding of a PRO-binding oligopeptide to an unrelated, non-PRO protein is less than about 10% of the binding of the PRO-binding oligopeptide to PRO as measured, e.g., by a surface plasmon resonance assay. In certain embodiments, a PRO-binding oligopeptide has a dissociation constant (Kd) of ≦100 nM, ≦10 nM, ≦1 nM, or ≦0.1 nM.

[0095] An “PRO-binding organic molecule” or “an organic molecule that binds PRO” is an organic molecule other than an oligopeptide or antibody as defined herein that is capable of binding PRO with sufficient affinity such that the organic molecule is useful as a diagnostic and/or therapeutic agent in targeting PRO. In certain embodiments, the extent of binding of a PRO-binding organic molecule to an unrelated, non-PRO protein is less than about 10% of the binding of the PRO-binding organic molecule to PRO as measured, e.g., by a surface plasmon resonance assay. In certain embodiments, a PRO-binding organic molecule has a dissociation constant (Kd) of ≦100 nM, ≦10 nM, ≦1 nM, or ≦0.1 nM.

[0096] The dissociation constant (Kd) of any molecule that binds a target polypeptide may conveniently be measured using a surface plasmon resonance assay. Such assays may employ a BIAcore™-2000 or a BIAcore™-3000 (BIAcore, Inc., Piscataway, N.J.) at 25° C. with immobilized target polypeptide CMS chips at ˜10 response units (RU). Briefly, carboxymethylated dextran biosensor chips (CM5, BIAcore Inc.) are activated with N-ethyl-N′-(3-dimethylaminopropyl)-carbodiimide hydrochloride (EDC) and N-hydroxysuccinimide (NHS) according to the supplier's instructions. Target polypeptide is diluted with 10 mM sodium acetate, pH 4.8, to 5 μg/ml (˜0.2 μM) before injection at a flow rate of 5 μl/minute to achieve approximately 10 response units (RU) of coupled protein. Following the injection of target polypeptide, 1 M ethanolamine is injected to block unreacted groups. For kinetics measurements, two-fold serial dilutions of the binding molecule (0.78 nM to 500 nM) are injected in PBS with 0.05% Tween 20 (PBST) at 25° C. at a flow rate of approximately 25 μl/min. Association rates (kₒₙ) and dissociation rates (k_{off}) are calculated using a simple one-to-one Langmuir binding model (BIAcore Evaluation Software version 3.2) by simultaneously fitting the association and dissociation sensorgrams. The equilibrium dissociation constant (Kd) is calculated as the ratio k_{off}/kₒₙ. See, e.g., Chen, Y., et al., (1999) J. Mol. Biol. 293:865-881. If the on-rate of an antibody exceeds 10⁶ M⁻¹ 5⁻¹ by the surface plasmon resonance assay above, then the on-rate can be determined by using a fluorescent quenching technique that measures the increase or decrease in fluorescence emission intensity (excitation=295 nm; emission=340 nm, 16 nm band-pass) at 25° C. of a 20 nM antibody (Fab form) in PBS, pH 7.2, in the presence of increasing concentrations of antigen as measured in a spectrometer, such as a stop-flow equipped spectrophometer (Aviv Instruments) or a 8000-series SLM-Aminco spectrophotometer (ThermoSpectronic) with a stirred cuvette.

[0097] A “liposome” is a small vesicle composed of various types of lipids, phospholipids and/or surfactant which is useful for delivery of an agent, e.g., a drug, to a mammal. The components of the liposome are commonly arranged in a bilayer formation, similar to the lipid arrangement of biological membranes.

[0098] The word “label” when used herein refers to a detectable compound or composition. The label may be detectable by itself (e.g., radioisotope labels or fluorescent labels) or, in the case of an enzymatic label, may catalyze chemical alteration of a substrate compound or composition which results in a detectable product. Radionuclides that can serve as detectable labels include, for example, I-131, I-123, I-125, Y-90, Re-188, Re-186, At-211, Cu-67, Bi-212, and Pd-109.

[0099] An “isolated” biological molecule, such as a nucleic acid, polypeptide, or antibody, is one which has been identified and separated and/or recovered from at least one component of its natural environment.

### II. Description of Certain Embodiments

[0100] Nucleotide and amino acid variations associated with tumors are provided herein. These variations provide biomarkers for cancer and/or predispose or contribute to tumorigenesis or tumor promotion. Accordingly, the variations disclosed herein are useful in a variety of settings, e.g., in methods and compositions related to cancer diagnosis and therapy.

[0101] A. Variations

[0102] Variations were identified in 100 genes from twenty-five different human lung tumor (non-small cell lung carcinoma) specimens. Those variations are listed in the tables shown in FIGS. 1, 2, and 3.

[0103] 1. Variations Identified by MRD

[0104] Variations were identified by MRD, as further described in Example A. Those variations are listed in FIG. 1. In FIG. 1, the first column of the table (“VARIANT ID”) lists the identification numbers assigned to each variation. The second column (“UNQID”) provides an additional gene-specific identification number. The third column (“GENE NAME (Ensembl)”) lists the genes in which the variations occur. The gene names are in accordance with Ensembl nomenclature. (The Ensembl project is described in Hubbard et al. (2006) Nucleic Acids Res. Database issue:D1-D8.) The fourth column (“GENE DESCRIPTION”) provides a brief description from Ensembl of each gene identified in the fourth column. The fifth column (“NT CHANGE”) lists the nucleotide changes by their chromosomal positions. For example, the designation “9:130790136:G/T” in column five of the first row indicates that a nucleotide change in ABL1 polynucleotide occurs at nucleotide 130790136 of chromosome 9, and the nucleotide change is a substitution of G at that position with T. In FIG. 1, the nucleotide changes are all single nucleotide substitutions. All nucleotide substitutions identified in FIG. 1 occurred in the coding regions of the indicated genes, and all are either nonsynonymous mutations or nonsense mutations. Additionally, all nucleotide substitutions identified in FIG. 1 are somatic mutations (i.e., mutations found only in the tumor sample and not in the patient matched normal sample).

[0105] The sixth column (“AA CHANGE”) of the table in FIG. 1 lists the amino acid changes resulting from the nucleotide substitutions listed in the previous column. The amino acid positions designated in column 6 refer to the PRO amino acid sequences provided in Table 1 below, which are translations of the corresponding PRO cDNA sequences, also provided in Table 1. The amino acid and cDNA sequences provided in Table 1 are from the Ensembl database. The designated amino acid positions in column 6 also refer to the corresponding amino acid positions of fragments or variants of PRO, (e.g., allelic variants or splice variants), which can be routinely identified using sequence alignments or similar techniques. Where a nucleotide substitution resulted in a stop codon (i.e., a nonsense mutation), the corresponding amino acid change is indicated in column 6 by an “O” (e.g., see Variant ID 10015, indicating an amino acid change of “1170Q→O”). The seventh column (“DOMAIN”) indicates, for some of the variations, the protein domains in which the amino acid changes occur. Protein domains are indicated by Pfam nomenclature. (See, e.g., Bateman et al. (2004) Nucleic Acids Res. 32(1):D138-141.)

TABLE 1

| | cDNA | |
|---|---|---|
| | SEQUENCE | AMINO ACID |
| | SEQ ID | SEQUENCE |
| GENE NAME | NO | SEQ ID NO: |
| ABL1 | 1 | 38 |
| APC | 2 | 39 |
| ATM | 3 | 40 |
| ATR | 4 | 41 |
| FBXW7 | 5 | 42 |
| FLT1 | 6 | 43 |
| FLT3 | 7 | 44 |
| FRAP1 | 8 | 45 |
| KDR | 9 | 46 |
| MET | 10 | 47 |
| MLL | 11 | 48 |
| NF1 | 12 | 49 |
| PDGFRA | 13 | 50 |
| PDGFRB | 14 | 51 |
| PLK1 | 15 | 52 |
| TCF1 | 16 | 53 |
| TP53 | 17 | 54 |
| TSHR | 18 | 55 |

[0106] FIG. 2 lists somatic nucleotide variations that fell within consensus splice site regions of six genes. In FIG. 2, the first column of the table (“VARIANT ID”) lists the identification numbers assigned to each variation. The second column (“UNQID”) provides an additional gene-specific identification number. The third column (“GENE”) lists the genes in which the variations occur. The gene names are in accordance with Ensembl nomenclature. The fourth column (“GENE DESCRIPTION”) provides a brief description from Ensembl of each gene identified in the fourth column. The fifth column (“NT CHANGE”) refers to the nucleotide changes, which were identified by MRD. The sixth column (“FREQUENCY”) indicates the number of times that a particular variation was found. The seventh column (“EXON AFFECTED”) refers to the exons associated with the consensus splice site variations. The eighth column (“SPLICE SITE”) describes with particularity where in the consensus splice sites the variations occurred. The ninth column (“PROTEIN EFFECT”) indicates whether the variations resulted in an in-frame or out-of-frame protein. The tenth column (“DOMAIN”) indicates the protein domains affected by two of the variations. The last column (“SKIP STATUS”) indicates whether the exons associated with the consensus splice site variations were skipped or not during mRNA splicing. The amino acid sequences encoded by certain genes listed in FIG. 2 are provided below in Table 2:

TABLE 2

| | AMINO ACID |
|---|---|
| | SEQUENCE SEQ |
| GENE NAME | ID NO: |
| ERBB4 | 75 |
| FGFR2 | 76 |
| MAP4K4 | 77 |
| PDK1 | 78 |
| RB1 | 79 |

[0107] 2. Variations Identified by Sanger Sequencing

[0108] Variations were identified by Sanger sequencing, as further described in Example B. Those variations are listed in FIG. 3. The first column of the table (“VARIANT ID”) lists the identification numbers assigned to each variation. The second column (“UNQID”) lists additional gene-specific identification numbers. The third column (“GENE NAME (HUGO)”) lists the genes in which the variations occur. The gene names are in accordance with the Human Genome Organisation (HUGO) nomenclature. See Wain et al. (2002) Genomics 79:464-470. The fourth column (“GENE DESCRIPTION”) provides a brief description from HUGO of each gene identified in the third column. The fifth column (“NT_CHGE”) lists the nucleotide change found in each gene. In this study, the nucleotide changes were all single nucleotide substitutions. The term “HETSUB” in the fifth column stands for “heterozygous substitution,” meaning that both the indicated variation and the wild type allele were detected in the tumor sample. The term “HOMSUB” stands for “homozygous substitution,” meaning that the indicated variation was detected in the tumor sample, and the wild type allele was not detected in the tumor sample. This may occur, for example, if the tumor has undergone loss of heterozygosity (e.g., where one copy of a given gene contains a variation, and the other copy contains a deletion in the corresponding gene). Nucleotide numbers refer to nucleotide positions in the cDNA sequences corresponding to the indicated genes. For example, Variant ID 912 is a heterozygous substitution designated “2667A>G,” indicating that an “A” has been substituted by a “G” in one copy of the PTCH gene, with the substitution occurring at a genomic position corresponding to nucleotide 2667 of the cDNA sequence (SEQ ID NO:32) of the PTCH gene. For each gene listed in FIG. 3, the corresponding cDNA sequences and their translations are provided in the sequence listing, as indicated in Table 3 below.

TABLE 3

| | cDNA | |
|---|---|---|
| | SEQUENCE | AMINO ACID |
| | SEQ ID | SEQUENCE |
| GENE NAME | NO | SEQ ID NO: |
| AKT2 | 19 | 56 |
| AURKC | 20 | 57 |
| BCL2L1 | 21 | 58 |
| CDKN2A | 22 | 59 |
| ERBB3 | 23 | 60 |
| ERBB4 | 24 | 61 |
| FGFR3 | 25 | 62 |
| FRAP1 | 26 | 63 |
| KDR | 27 | 64 |
| MAP2K2 | 28 | 65 |
| MET | 29 | 66 |
| PIK3CA | 30 | 67 |
| PLK1 | 31 | 68 |
| PTCH | 32 | 69 |
| RB1 | 33 | 70 |
| RET | 34 | 71 |
| STK6 | 35 | 72 |
| TGFBR2 | 36 | 73 |
| TP53 | 37 | 74 |

All nucleotide substitutions identified in FIG. 3 occurred in the coding regions of the indicated genes. Additionally, all nucleotide substitutions identified in this study were validated (i.e., confirmed) by resequencing DNA from the tumor sample(s) in which the variation was initially discovered.

[0109] The sixth column (“AA_CHGE”) of the table in FIG. 3 lists the amino acid changes resulting from the nucleotide substitutions listed in the previous column. Amino acids are numbered according to their positions in the translated cDNA sequences. Where a nucleotide substitution resulted in a stop codon (i.e., a nonsense mutation), the corresponding amino acid change is indicated by an “O” (e.g., see Variant ID 4356, indicating an amino acid change of “61C>O”). The seventh column (“EFFECT”) indicates whether the variation results in a nonsynonymous (“Nonsyn.”) amino acid substitution or in a nonsense (“Nonsense”) mutation. The eighth column (“DOMAIN”) indicates, for some of the variations, the protein domains in which the amino acid changes occur. Protein domains are indicated by Pfam nomenclature. (See, e.g., Bateman et al. (2004) Nucleic Acids Res. 32(1):D138-141.)

[0110] The ninth column (“SOMATIC OR GERMLINE”) indicates whether a given variation was found only in the tumor sample and not in the patient matched normal sample (i.e., a somatic mutation), or whether it was found in both the tumor sample and the patient matched normal sample (i.e., a germline polymorphism). Certain variations were found in multiple tumor samples. In such cases, a variation was classified as a somatic mutation if it was found to be absent from at least one patient matched normal sample. Likewise, a variation was classified as a germline polymorphism it was found to be present in at least one patient matched normal sample.

[0111] 3. Tumor Types and Protein Families

[0112] The variations listed in FIGS. 1, 2, and 3 were identified in non-small cell lung carcinomas. Routine screening may be used to determine whether variations occur in other types of cancers. The compositions and methods of the present invention are applicable to any cancer comprising variations in the indicated genes and/or encoded polypeptides.

[0113] Variations were found in genes encoding proteins from a variety of protein families. For example, variations were found in a number of genes encoding kinases, including receptor tyrosine kinases (RTKs). Generally, activation of kinases is often associated with cell proliferation and tumor promotion. Thus, variations in genes encoding kinases may be “gain-of-function” mutations that increase kinase activity. Tumors in which such variations are detected may thus be responsive to kinase antagonists. A variety of kinase antagonists are currently known in the art. Such kinase antagonists include, but are not limited to antagonist antibodies and small molecule antagonists, e.g., 3-[2,4-dimethylpyrrol-5-yl)methylidene]-indolin-2-one (“SU5416”); imatinib (Gleevec®), a 2-phenylaminopyrimidine; 1-tert-butyl-3-[6-(3,5-dimethoxy-phenyl)-2-(4-diethylamino-butylamino)-pyrido[2,3-d]pyrimidin-7-yl]-urea (“PD173074”) (see, e.g., Moffa et al. (2004) Mol. Cancer. Res. 2:643-652); and indolinones such as 3-[3-(2-carboxyethyl)-4-methylpyrrol-2-methylidenyl]-2-indolinone (“SU5402”) (see, e.g., Bernard-Pierrot (2004) Oncogene 23:9201-9211). A kinase antagonist may also be an EGFR inhibitor or a tyrosine kinase inhibitor, as defined herein.

[0114] Variations were also found in tumor suppressor genes (e.g., p53 and retinoblastoma). Generally, loss of tumor suppressor function is often associated with cell proliferation and tumor promotion. Thus, variations in genes encoding tumor suppressors may be complete or partial “loss-of-function” mutations that decrease tumor suppressor function. Tumors in which such variations are detected may be responsive to tumor suppressor agonists. A tumor suppressor agonist may be, e.g., an agonist antibody, a polynucleotide encoding a tumor suppressor, the tumor suppressor itself, or a tumor suppressor-Fc fusion.

[0115] B. Compositions

[0116] In one aspect, an isolated polynucleotide comprising at least a fragment of a PRO polynucleotide is provided, wherein the fragment comprises a nucleotide variation. In one embodiment, the nucleotide variation is at a nucleotide position selected from FIGS. 1-3. In one such embodiment, the nucleotide variation is a nucleotide change selected from FIGS. 1-3. In another embodiment, a fragment of a PRO polynucleotide is at least about 10 nucleotides in length, alternatively at least about 15 nucleotides in length, alternatively at least about 20 nucleotides in length, alternatively at least about 30 nucleotides in length, alternatively at least about 40 nucleotides in length, alternatively at least about 50 nucleotides in length, alternatively at least about 60 nucleotides in length, alternatively at least about 70 nucleotides in length, alternatively at least about 80 nucleotides in length, alternatively at least about 90 nucleotides in length, alternatively at least about 100 nucleotides in length, alternatively at least about 110 nucleotides in length, alternatively at least about 120 nucleotides in length, alternatively at least about 130 nucleotides in length, alternatively at least about 140 nucleotides in length, alternatively at least about 150 nucleotides in length, alternatively at least about 160 nucleotides in length, alternatively at least about 170 nucleotides in length, alternatively at least about 180 nucleotides in length, alternatively at least about 190 nucleotides in length, alternatively at least about 200 nucleotides in length, alternatively at least about 250 nucleotides in length, alternatively at least about 300 nucleotides in length, alternatively at least about 350 nucleotides in length, alternatively at least about 400 nucleotides in length, alternatively at least about 450 nucleotides in length, alternatively at least about 500 nucleotides in length, alternatively at least about 600 nucleotides in length, alternatively at least about 700 nucleotides in length, alternatively at least about 800 nucleotides in length, alternatively at least about 900 nucleotides in length, alternatively at least about 1000 nucleotides in length, and alternatively about the length of the full-length coding sequence. In this context the term “about” means the referenced nucleotide sequence length plus or minus 10% of that referenced length. In another embodiment, the polynucleotide comprises a nucleotide variation in a polynucleotide sequence selected from SEQ ID NO:1-37 or a fragment thereof. In another embodiment, the complement of any of the above polynucleotides is provided. In another embodiment, a PRO encoded by the any of the above polynucleotides is provided.

[0117] In one embodiment, an isolated polynucleotide provided herein is detectably labeled, e.g., with a radioisotope, a fluorescent agent, or a chromogenic agent. In another embodiment, an isolated polynucleotide is a primer. In another embodiment, an isolated polynucleotide is an oligonucleotide, e.g., an allele-specific oligonucleotide. In another embodiment, an oligonucleotide may be, for example, from 7-60 nucleotides in length, 9-45 nucleotides in length, 15-30 nucleotides in length, or 18-25 nucleotides in length. In another embodiment, an oligonucleotide may be, e.g., PNA, morpholino-phosphoramidates, LNA, or 2′-alkoxyalkoxy. Oligonucleotides as provided herein are useful, e.g., as hybridization probes for the detection of nucleotide variations.

[0118] In another aspect, an allele-specific oligonucleotide is provided that hybridizes to a region of a PRO polynucleotide comprising a nucleotide variation (e.g., a substitution). In one embodiment, the nucleotide variation is at a nucleotide position selected from FIGS. 1-3. In one such embodiment, the nucleotide variation is a nucleotide change selected from FIGS. 1-3. The allele-specific oligonucleotide, when hybridized to the region of the PRO polynucleotide, comprises a nucleotide that base pairs with the nucleotide variation. In another embodiment, the complement of an allele-specific oligonucleotide is provided. In another embodiment, a microarray comprises an allele-specific oligonucleotide or its complement. In another embodiment, an allele-specific oligonucleotide or its complement is an allele-specific primer.

[0119] An allele-specific oligonucleotide can be used in conjunction with a control oligonucleotide that is identical to the allele-specific oligonucleotide, except that the nucleotide that specifically base pairs with the nucleotide variation is replaced with a nucleotide that specifically base pairs with the corresponding nucleotide present in the wild type PRO polynucleotide. Such oligonucleotides may be used in competitive binding assays under hybridization conditions that allow the oligonucleotides to distinguish between a PRO polynucleotide comprising a nucleotide variation and a PRO polynucleotide comprising the corresponding wild type nucleotide. Using routine methods based on, e.g., the length and base composition of the oligonucleotides, one skilled in the art can arrive at suitable hybridization conditions under which (a) an allele-specific oligonucleotide will preferentially bind to a PRO polynucleotide comprising a nucleotide variation relative to a wild type PRO polynucleotide, and (b) the control oligonucleotide will preferentially bind to a wild type PRO polynucleotide relative to a PRO polynucleotide comprising a nucleotide variation. Exemplary conditions include conditions of high stringency, e.g., hybridization conditions of 5× standard saline phosphate EDTA (SSPE) and 0.5% NaDodSO₄ (SDS) at 55° C., followed by washing with 2×SSPE and 0.1% SDS at 55° C. or room temperature.

[0120] In another aspect, a binding agent is provided that preferentially binds to a PRO comprising an amino acid variation, relative to a wild-type PRO. In one embodiment, the amino acid variation is at an amino acid position selected from FIG. 1 or 3. In one such embodiment, the amino acid variation is an amino acid change selected from FIG. 1 or 3. In another embodiment, the binding agent is an antibody.

[0121] In another aspect, diagnostic kits are provided. In one embodiment, a kit comprises any of the foregoing polynucleotides and an enzyme. In one embodiment, the enzyme is at least one enzyme selected from a nuclease, a ligase, and a polymerase.

[0122] C. Methods

[0123] In one aspect, a method of detecting the presence of a tumor is provided, the method comprising detecting a variation in a PRO or PRO polynucleotide derived from a biological sample. In one embodiment, the biological sample is obtained from a mammal suspected of having a tumor.

[0124] In another aspect, a method of determining the genotype of a biological sample is provided, the method comprising detecting whether a nucleotide variation is present in a PRO polynucleotide derived from the biological sample. In one embodiment, the nucleotide variation is at a nucleotide position selected from FIGS. 1-3. In one such embodiment, the nucleotide variation is a nucleotide change selected from FIGS. 1-3. In another embodiment, the biological sample is suspected of comprising tumor cells. In another embodiment, the biological sample is a cell line, e.g., an immortalized cell line. In another embodiment, the biological sample is a tumor. In one such embodiment, the genotyping of the tumor provides a basis for classifying the tumor.

[0125] In another aspect, a method of identifying tumor cells in a biological sample from a mammal is provided, the method comprising detecting a variation in a PRO or PRO polynucleotide derived from the biological sample. In one embodiment, the variation is a nucleotide variation. In one such embodiment, the nucleotide variation is at a nucleotide position selected from FIGS. 1-3. In one such embodiment, the nucleotide variation is a nucleotide change selected from FIGS. 1-3. In another embodiment, the variation is an amino acid variation. In one such embodiment, the amino acid variation is in a PRO functional domain selected from FIG. 1 or 3. In another such embodiment, the amino acid variation is at an amino acid position selected from FIG. 1 or 3. In another such embodiment, the amino acid variation is an amino acid change selected from FIG. 1 or 3. In another embodiment, the biological sample is a biopsy (e.g., a tissue sample containing cells suspected of being cancerous).

[0126] In another aspect, a method of diagnosing a tumor in a mammal is provided, the method comprising detecting the presence of a variation in a PRO or PRO polynucleotide derived from a biological sample obtained from the mammal, wherein the biological sample is known to or suspected of comprising tumor cells. In one embodiment, the variation is a nucleotide variation. In one such embodiment, the nucleotide variation is at a nucleotide position selected from FIGS. 1-3. In one such embodiment, the nucleotide variation is a nucleotide change selected from FIGS. 1-3. In another embodiment, the variation is an amino acid variation. In one such embodiment, the amino acid variation is in a PRO functional domain selected from FIG. 1 or 3. In another such embodiment, the amino acid variation is at an amino acid position selected from FIG. 1 or 3. In another such embodiment, the amino acid variation is an amino acid change selected from FIG. 1 or 3. In another embodiment, the method is a method of classifying a tumor, e.g., as a tumor characterized by a nucleotide or amino acid variation(s) in a particular PRO polynucleotide or PRO.

[0127] In another aspect, a method is provided for predicting whether a tumor from a mammal will respond to a therapeutic agent that targets a PRO or PRO polynucleotide, the method comprising determining whether the tumor comprises a variation in a PRO or PRO polynucleotide, wherein the presence of a variation in a PRO or PRO polynucleotide indicates that the tumor will respond to the therapeutic agent. In one embodiment, the variation is a nucleotide variation. In one such embodiment, the nucleotide variation is at a nucleotide position selected from FIGS. 1-3. In one such embodiment, the nucleotide variation is a nucleotide change selected from FIGS. 1-3. In another embodiment, the variation is an amino acid variation. In one such embodiment, the amino acid variation is in a PRO functional domain selected from FIG. 1 or 3. In another such embodiment, the amino acid variation is at an amino acid position selected from FIG. 1 or 3. In another such embodiment, the amino acid variation is an amino acid change selected from FIG. 1 or 3. In another embodiment, the PRO is a kinase (such as a tyrosine kinase, e.g., an RTK). In another embodiment, the PRO is a tumor suppressor.

[0128] In another aspect, a method of detecting the absence or presence of a nucleotide variation at a nucleotide position in a nucleic acid encoding a PRO is provided, the method comprising (a) contacting the nucleic acid with any of the polynucleotides described above (section II.B.) under conditions suitable for formation of a hybridization complex between the nucleic acid and the polynucleotide; and (b) detecting whether the polynucleotide specifically base pairs with the nucleic acid at the nucleotide position. In one embodiment, the nucleotide variation is at a nucleotide position selected from FIGS. 1-3. In one such embodiment, the nucleotide variation is a nucleotide change selected from FIGS. 1-3.

[0129] In another aspect, a method of detecting the absence or presence of a nucleotide variation in a nucleic acid encoding a PRO is provided, the method comprising (a) contacting the nucleic acid with an allele-specific oligonucleotide that is specific for the nucleotide variation under conditions suitable for hybridization of the allele-specific oligonucleotide to the nucleic acid; and (b) detecting the absence or presence of allele-specific hybridization. In one embodiment, the nucleotide variation is at a nucleotide position selected from FIGS. 1-3. In one such embodiment, the nucleotide variation is a nucleotide change selected from FIGS. 1-3. In another embodiment, an allele-specific oligonucleotide is an allele-specific primer.

[0130] In another aspect, a method of amplifying a nucleic acid comprising a PRO polynucleotide or fragment thereof is provided, wherein the PRO polynucleotide or fragment thereof comprises a nucleotide variation, the method comprising (a) contacting the nucleic acid with a primer that hybridizes to a sequence 3′ of the nucleotide variation, and (b) extending the primer to generate an amplification product comprising the nucleotide variation. In one embodiment, the method further comprises contacting the amplification product with a second primer that hybridizes to a sequence 3′ of the nucleotide variation, and extending the second primer to generate a second amplification product. In one such embodiment, the method further comprises amplifying the amplification product and second amplification product, e.g., by PCR. In any of the above embodiments, the nucleotide variation is at a nucleotide position selected from FIGS. 1-3. In any of the above embodiments, the nucleotide variation is a nucleotide change selected from FIGS. 1-3.

[0131] In another aspect, a method of assessing the activity of a PRO comprising an amino acid variation is provided, the method comprising (a) determining the activity of the PRO; and (b) comparing the activity of the PRO with the activity of a wild-type PRO. In one embodiment, the activity is kinase activity. In another embodiment, the activity is tumor suppressor activity. In another embodiment, the amino acid variation is in a PRO functional domain selected from FIG. 1 or 3. In another embodiment, the amino acid variation is at an amino acid position selected from FIG. 1 or 3. In another embodiment, the amino acid variation is an amino acid change selected from FIG. 1 or 3.

[0132] In another aspect, a method of identifying an agent for the treatment of a tumor is provided, the method comprising (a) contacting a PRO with a test agent, wherein the PRO comprises an amino acid variation, (b) assessing the activity of the PRO in the presence of the test agent with the activity of the PRO in the absence of the test agent, wherein an increase or decrease in the activity of the PRO in the presence of the test agent indicates that the test agent is an agent for the treatment of a tumor. In one embodiment, the amino acid variation is in a PRO functional domain selected from FIG. 1 or 3. In another embodiment, the amino acid variation is at an amino acid position selected from FIG. 1 or 3. In another embodiment, the amino acid variation is an amino acid change selected from FIG. 1 or 3. In another embodiment, the PRO is a kinase (such as a tyrosine kinase, e.g., an RTK), and a decrease in the activity of the kinase in the presence of the test agent indicates that the test agent is an agent for the treatment of a tumor. In another embodiment, the PRO is a tumor suppressor, and an increase in the activity of the tumor suppressor in the presence of the test agent indicates that the test agent is an agent for the treatment of a tumor.

[0133] In another aspect, a method of inhibiting the proliferation of a tumor cell is provided, wherein the tumor cell comprises a PRO having an activating variation, the method comprising exposing the tumor cell to an antagonist of PRO. In one embodiment, the PRO is a kinase, e.g., a receptor tyrosine kinase.

[0134] In another aspect, a method of inhibiting the proliferation of a tumor cell is provided, wherein the tumor cell comprises a variation in a PRO that decreases the activity of PRO, the method comprising exposing the tumor cell to an agonist of PRO. In one embodiment, an agonist comprises a PRO polynucleotide or PRO itself. In another embodiment, the PRO is a tumor suppressor.

[0135] In another aspect, a method of treating a tumor comprising a variation in a PRO is provided, the method comprising administering to a mammal having the tumor an effective amount of a pharmaceutical formulation comprising an antagonist or agonist of PRO. In one embodiment, the variation is a nucleotide variation. In one such embodiment, the nucleotide variation is at a nucleotide position selected from FIGS. 1-3. In one such embodiment, the nucleotide variation is a nucleotide change selected from FIGS. 1-3. In another embodiment, the variation is an amino acid variation. In one such embodiment, the amino acid variation is in a PRO functional domain selected from FIG. 1 or 3. In another such embodiment, the amino acid variation is at an amino acid position selected from FIG. 1 or 3. In another such embodiment, the amino acid variation is an amino acid change selected from FIG. 1 or 3. In another embodiment, the PRO is a kinase (such as a tyrosine kinase, e.g., an RTK). In another embodiment, the PRO is a tumor suppressor.

[0136] A tumor, according to any of the above methods, may be a tumor selected from a lung tumor (particularly non-small cell lung carcinomas), breast tumor, colon tumor, kidney tumor, liver tumor, bladder tumor, ovarian tumor, stomach tumor, skin tumor (including melanoma and non-melanoma skin cancers), and lymphoma. In one embodiment, a tumor is a lung tumor, e.g., a non-small cell lung carcinoma.

[0137] A nucleotide variation, according to any of the above methods, may be a somatic mutation or a germline polymorphism.

[0138] D. General Techniques

[0139] Nucleic acid, according to any of the above methods, may be genomic DNA; RNA transcribed from genomic DNA; or cDNA generated from RNA. Nucleic acid may be derived from a vertebrate, e.g., a mammal A nucleic acid is said to be “derived from” a particular source if it is obtained directly from that source or if it is a copy of a nucleic acid found in that source.

[0140] Nucleic acid includes copies of the nucleic acid, e.g., copies that result from amplification. Amplification may be desirable in certain instances, e.g., in order to obtain a desired amount of material for detecting variations. For example, a PRO polynucleotide or portion thereof may be amplified from nucleic acid material. The amplicons may then be subjected to a variation detection method, such as those described below, to determine whether a variation is present in the amplicon.

[0141] Variations may be detected by certain methods known to those skilled in the art. Such methods include, but are not limited to, DNA sequencing; primer extension assays, including allele-specific nucleotide incorporation assays and allele-specific primer extension assays (e.g., allele-specific PCR, allele-specific ligation chain reaction (LCR), and gap-LCR); allele-specific oligonucleotide hybridization assays (e.g., oligonucleotide ligation assays); cleavage protection assays in which protection from cleavage agents is used to detect mismatched bases in nucleic acid duplexes; analysis of MutS protein binding; electrophoretic analysis comparing the mobility of variant and wild type nucleic acid molecules; denaturing-gradient gel electrophoresis (DGGE, as in, e.g., Myers et al. (1985) Nature 313:495); analysis of RNase cleavage at mismatched base pairs; analysis of chemical or enzymatic cleavage of heteroduplex DNA; mass spectrometry (e.g., MALDI-TOF); genetic bit analysis (GBA); 5′ nuclease assays (e.g., TaqMan®)); and assays employing molecular beacons. Certain of these methods are discussed in further detail below.

[0142] Detection of variations in target nucleic acids may be accomplished by molecular cloning and sequencing of the target nucleic acids using techniques well known in the art. Alternatively, amplification techniques such as the polymerase chain reaction (PCR) can be used to amplify target nucleic acid sequences directly from a genomic DNA preparation from tumor tissue. The nucleic acid sequence of the amplified sequences can then be determined and variations identified therefrom. Amplification techniques are well known in the art, e.g., polymerase chain reaction is described in Saiki et al., Science 239:487, 1988; U.S. Pat. Nos. 4,683,203 and 4,683,195.

[0143] The ligase chain reaction, which is known in the art, can also be used to amplify target nucleic acid sequences. See, e.g., Wu et al., Genomics 4:560-569 (1989). In addition, a technique known as allele-specific PCR can also be used to detect variations (e.g., substitutions). See, e.g., Ruano and Kidd (1989) Nucleic Acids Research 17:8392; McClay et al. (2002) Analytical Biochem. 301:200-206. In certain embodiments of this technique, an allele-specific primer is used wherein the 3′ terminal nucleotide of the primer is complementary to (i.e., capable of specifically base-pairing with) a particular variation in the target nucleic acid. If the particular variation is not present, an amplification product is not observed. Amplification Refractory Mutation System (ARMS) can also be used to detect variations (e.g., substitutions). ARMS is described, e.g., in European Patent Application Publication No. 0332435, and in Newton et al., Nucleic Acids Research, 17:7, 1989.

[0144] Other methods useful for detecting variations (e.g., substitutions) include, but are not limited to, (1) allele-specific nucleotide incorporation assays, such as single base extension assays (see, e.g., Chen et al. (2000) Genome Res. 10:549-557; Fan et al. (2000) Genome Res. 10:853-860; Pastinen et al. (1997) Genome Res. 7:606-614; and Ye et al. (2001) Hum. Mut. 17:305-316); (2) allele-specific primer extension assays (see, e.g., Ye et al. (2001) Hum. Mut. 17:305-316; and Shen et al. Genetic Engineering News, vol. 23, Mar. 15, 2003), including allele-specific PCR; (3) 5′ nuclease assays (see, e.g., De La Vega et al. (2002) BioTechniques 32:S48-S54 (describing the TaqMan® assay); Ranade et al. (2001) Genome Res. 11:1262-1268; and Shi (2001) Clin. Chem. 47:164-172); (4) assays employing molecular beacons (see, e.g., Tyagi et al. (1998) Nature Biotech. 16:49-53; and Mhlanga et al. (2001) Methods 25:463-71); and (5) oligonucleotide ligation assays (see, e.g., Grossman et al. (1994) Nuc. Acids Res. 22:4527-4534; patent application Publication No. US 2003/0119004 A1; PCT International Publication No. WO 01/92579 A2; and U.S. Pat. No. 6,027,889).

[0145] Variations may also be detected by mismatch detection methods. Mismatches are hybridized nucleic acid duplexes which are not 100% complementary. The lack of total complementarity may be due to deletions, insertions, inversions, or substitutions. One example of a mismatch detection method is the Mismatch Repair Detection (MRD) assay described, e.g., in Faham et al., Proc. Natl. Acad. Sci. USA 102:14717-14722 (2005) and Faham et al., Hum. Mol. Genet. 10:1657-1664 (2001). Another example of a mismatch cleavage technique is the RNase protection method, which is described in detail in Winter et al., Proc. Natl. Acad. Sci. USA, 82:7575, 1985, and Myers et al., Science 230:1242, 1985. For example, a method of the invention may involve the use of a labeled riboprobe which is complementary to the human wild-type target nucleic acid. The riboprobe and target nucleic acid derived from the tissue sample are annealed (hybridized) together and subsequently digested with the enzyme RNase A which is able to detect some mismatches in a duplex RNA structure. If a mismatch is detected by RNase A, it cleaves at the site of the mismatch. Thus, when the annealed RNA preparation is separated on an electrophoretic gel matrix, if a mismatch has been detected and cleaved by RNase A, an RNA product will be seen which is smaller than the full-length duplex RNA for the riboprobe and the mRNA or DNA. The riboprobe need not be the full length of the target nucleic acid, but can a portion of the target nucleic acid, provided it encompasses the position suspected of having a variation.

[0146] In a similar manner, DNA probes can be used to detect mismatches, for example through enzymatic or chemical cleavage. See, e.g., Cotton et al., Proc. Natl. Acad. Sci. USA, 85:4397, 1988; and Shenk et al., Proc. Natl. Acad. Sci. USA, 72:989, 1975. Alternatively, mismatches can be detected by shifts in the electrophoretic mobility of mismatched duplexes relative to matched duplexes. See, e.g., Cariello, Human Genetics, 42:726, 1988. With either riboprobes or DNA probes, the target nucleic acid suspected of comprising a variation may be amplified before hybridization. Changes in target nucleic acid can also be detected using Southern hybridization, especially if the changes are gross rearrangements, such as deletions and insertions.

[0147] Restriction fragment length polymorphism (RFLP) probes for the target nucleic acid or surrounding marker genes can be used to detect variations, e.g., insertions or deletions. Insertions and deletions can also be detected by cloning, sequencing and amplification of a target nucleic acid. Single stranded conformation polymorphism (SSCP) analysis can also be used to detect base change variants of an allele. See, e.g. Orita et al., Proc. Natl. Acad. Sci. USA 86:2766-2770, 1989, and Genomics, 5:874-879, 1989.

[0148] The invention also provides a variety of compositions suitable for use in performing methods of the invention. For example, the invention provides arrays that can be used in such methods. In one embodiment, an array of the invention comprises individual or collections of nucleic acid molecules useful for detecting variations of the invention. For instance, an array of the invention may comprise a series of discretely placed individual allele-specific oligonucleotides or sets of allele-specific oligonucleotides. Several techniques are well-known in the art for attaching nucleic acids to a solid substrate such as a glass slide. One method is to incorporate modified bases or analogs that contain a reactive moiety that is capable of attachment to a solid substrate, such as an amine group, a derivative of an amine group, or another group with a positive charge, into nucleic acid molecules that are synthesized. The synthesized product is then contacted with a solid substrate, such as a glass slide coated with an aldehyde or other reactive group. The aldehyde or other reactive group will form a covalent link with the reactive moiety on the amplified product, which will become covalently attached to the glass slide. Other methods, such as those using amino propryl silican surface chemistry are also known in the art.

[0149] A biological sample, according to any of the above methods, may be obtained using certain methods known to those skilled in the art. Biological samples may be obtained from vertebrate animals, and in particular, mammals. Tissue biopsy is often used to obtain a representative piece of tumor tissue. Alternatively, tumor cells can be obtained indirectly in the form of tissues or fluids that are known or thought to contain the tumor cells of interest. For instance, samples of lung cancer lesions may be obtained by resection, bronchoscopy, fine needle aspiration, bronchial brushings, or from sputum, pleural fluid or blood. Variations in target nucleic acids (or encoded polypeptides) may be detected from a tumor sample or from other body samples such as urine, sputum or serum. (Cancer cells are sloughed off from tumors and appear in such body samples.) By screening such body samples, a simple early diagnosis can be achieved for diseases such as cancer. In addition, the progress of therapy can be monitored more easily by testing such body samples for variations in target nucleic acids (or encoded polypeptides). Additionally, methods for enriching a tissue preparation for tumor cells are known in the art. For example, the tissue may be isolated from paraffin or cryostat sections. Cancer cells may also be separated from normal cells by flow cytometry or laser capture microdissection.

### III. Examples

[0150] Twenty-five different human non-small cell lung carcinoma (NSCLC) specimens were obtained from commercial sources. The specimens were subjected to pathology review to ensure sufficient tumor content (i.e., on average>75% tumor cells). One hundred genes were analyzed for variations using Mismatch Repair Detection (MRD), and a subset of those genes was analyzed independently using Sanger sequencing, as described below. Some of the 100 selected genes were known or suspected to play a role in cancer, and some had not been previously implicated in tumorigenesis or tumor progression.

[0151] A. Identification of Variations by MRD

[0152] Mismatch Repair Detection (MRD) was used to identify nucleotide variations in the selected genes. The details of the MRD method are described in Faham et al., Proc. Natl. Acad. Sci. USA 102:14717-14722 (2005) and Faham et al., Hum. Mol. Genet. 10:1657-1664 (2001). Briefly, PCR primers were designed for each exon of interest. At the 5′ end of each forward PCR primer a 25 nucleotide sequence was added. Twenty one of the nucleotides constitute a tag sequence specific to each amplicon, and the remaining four base pairs form a Hae III restriction enzyme digestion site, which was ultimately used to separate the tag from the genomic sequence before the array detection step.

[0153] PCR amplification was carried out with each primer pair using the homozygous reference genome (hydatiform mole) as a template. All amplicons were then pooled and cloned into a plasmid to make reference sequences. For sequences carrying a common SNP, an attempt was made to create two standards (with two distinct tag sequences) corresponding to each of the two alleles. The same PCR primers were utilized for multiplex PCR using Pfu polymerase (Stratagene, La Jolla, Calif.) from each pair of tumor and matched normal DNA. The PCR products from tumor and matched normal samples were hybridized to the set of reference sequences (as well as a control vector lacking genomic sequence), thereby resulting in formation of heteroduplex DNA molecules with one strand of the genomic region of interest from the reference genome and the other from the test sample.

[0154] The heteroduplex molecules were then transformed en masse into the Mutation Sorter E. coli strain. The Mutation Sorter strain is engineered such that bacteria that repair a mismatch between the reference and test DNA have a different antibiotic resistance phenotype from those that do not repair. (See Faham et al., (2001) supra.) After transformation, the bacterial culture was grown in two different media to select for variant and non-variant fragments. Miniprep DNA obtained from the two selected bacterial cultures was PCR amplified using primers complementary to the vector sequence. The PCR products were Hae III digested to separate the tag sequence from the rest of the genomic sequence and the tags from the two pools were mixed and hybridized onto an array in a two-color assay. Fragments that were identical to the reference sample generated signal primarily in the non-variant pool, while those that were different from the reference sample had signal primarily in the variant pool, and heterozygous fragments generated signal in both pools.

[0155] Nucleotide variations identified by MRD were determined to be somatic mutations by genotyping tumor and matched normal samples using an alternative mass spectrometry-based approach, as described in Nelson et al., Genome Res. 14:1664-1668. Nucleotide variations that were confirmed to be somatic were compared with somatic mutations in the Catalogue of Somatic Mutations in Cancer (COSMIC) database (see Bamford et al. (2004) British Journal of Cancer 91:355-358). Twelve somatic nucleotide variations were found in the COSMIC database and are not reported herein.

[0156] Novel nucleotide variations identified by MRD are shown in FIG. 1. FIG. 1 lists somatic nucleotide variations that are nonsynonymous or nonsense mutations. FIG. 2 lists somatic nucleotide variations that fall within consensus splice site regions. FIGS. 1 and 2 are described in further detail in the above Detailed Description of Embodiments.

[0157] It is noted that MRD identified three somatic mutations in the WD40 domain of the FBXW7 gene (see Variation ID Nos. 10007, 10008, and 10009). FBXW7 is a known tumor suppressor shown to lead to chromosome instability in colorectal tumors when lost. See Rajagopalan, H. et al. (2004) Nature 428:77-81. The WD40 domain, which is important in the interaction between FBXW7 and cyclin E (see Orlicky, S. et al. (2003) Cell 112:243-256), has been found to be mutated in colorectal cancer. See Rajagopalan, supra. FBXW7 was sequenced in an additional 61 NSCLC tumors, but no further mutations were identified. To the inventors' knowledge, mutations in FBXW7 have not been previously reported in NSCLC.

[0158] B. Identification of Variations by Sanger Sequencing

[0159] Sanger sequencing was also used to identify nucleotide variations in 52 of the 100 originally selected genes. Specifically, PCR was used to amplify exons in those genes from tumor genomic DNA. Amplicons were sequenced using standard Sanger sequencing, and the sequences were compared with the corresponding wild-type sequences to identify variations. The variations were compared with single nucleotide polymorphisms in the NCBI “dbSNP” database (see Sherry et al. (1999) Genome Res. 9:677-679) and with somatic mutations in the Catalogue of Somatic Mutations in Cancer (COSMIC) database (see Bamford et al. (2004) British Journal of Cancer 91:355-358) to identify the variations that were not present in those databases and were thus determined to be novel. The variations were validated (i.e., confirmed) by reamplifying and resequencing the exons from the original tumor samples. Genomic DNA of patient matched normal samples was used to determine whether the variations were somatic mutations or germline polymorphisms. The results of the foregoing analysis, including a listing of the nucleotide variations thus identified, are shown in FIG. 3. FIG. 3 is described in further detail in the above Detailed Description of Embodiments. Some of the variations identified in FIG. 3 were also identified by MRD but were omitted from FIG. 1 (listing MRD-identified mutations) to avoid redundancy.

[0160] Although the foregoing invention has been described in some detail by way of illustration and example for purposes of clarity of understanding, the descriptions and examples should not be construed as limiting the scope of the invention. The disclosures of all patent and scientific literatures cited herein are expressly incorporated in their entirety by reference.

The application's sequence listing, which the Patent Office published only in electronic form, follows.

SEQUENCE LISTING (79 sequences)

SEQ ID NO: 1 - DNA, 5766 bp, Homo sapiens
ggccttccccctgcgaggatcgccattggcccgggttggctttggaaagcggcggtggctttgggccgggctcggcctcgggaacgccaggggcccctgggtgcggacgggcgcggccaggagggggttaaggcgcaggcggcggcggggcgggggcgggcctggcgggcgccctctccgggccctttgttaacaggcgcgtcccggccaggcggagacgcggccgcggccatgggcgggcgcgggcgcgcggggcggcggtgagggcggctggcggggccgggggcgccgggggggcgcgcgggccgagccgggcctgagccgggcccgcggaccgagctgggagaggggttccggcccccgacgtgctggcgcgggaaaatgttggagatctgcctgaagctggtgggctgcaaatccaagaaggggctgtcctcgtcctccagctgttatctggaagaagcccttcagcggccagtagcatctgactttgagcctcagggtctgagtgaagccgctcgttggaactccaaggaaaaccttctcgctggacccagtgaaaatgaccccaaccttttcgttgcactgtatgattttgtggccagtggagataacactctaagcataactaaaggtgaaaagctccgggtcttaggctataatcacaatggggaatggtgtgaagcccaaaccaaaaatggccaaggctgggtcccaagcaactacatcacgccagtcaacagtctggagaaacactcctggtaccatgggcctgtgtcccgcaatgccgctgagtatctgctgagcagcgggatcaatggcagcttcttggtgcgtgagagtgagagcagtcctggccagaggtccatctcgctgagatacgaagggagggtgtaccattacaggatcaacactgcttctgatggcaagctctacgtctcctccgagagccgcttcaacaccctggccgagttggttcatcatcattcaacggtggccgacgggctcatcaccacgctccattatccagccccaaagcgcaacaagcccactgtctatggtgtgtcccccaactacgacaagtgggagatggaacgcacggacatcaccatgaagcacaagctgggcgggggccagtacggggaggtgtacgagggcgtgtggaagaaatacagcctgacggtggccgtgaagaccttgaaggaggacaccatggaggtggaagagttcttgaaagaagctgcagtcatgaaagagatcaaacaccctaacctggtgcagctccttggggtctgcacccgggagcccccgttctatatcatcactgagttcatgacctacgggaacctcctggactacctgagggagtgcaaccggcaggaggtgaacgccgtggtgctgctgtacatggccactcagatctcgtcagccatggagtacctggagaagaaaaacttcatccacagagatcttgctgcccgaaactgcctggtaggggagaaccacttggtgaaggtagctgattttggcctgagcaggttgatgacaggggacacctacacagcccatgctggagccaagttccccatcaaatggactgcacccgagagcctggcctacaacaagttctccatcaagtccgacgtctgggcatttggagtattgctttgggaaattgctacctatggcatgtccccttacccgggaattgacctgtcccaggtgtatgagctgctagagaaggactaccgcatggagcgcccagaaggctgcccagagaaggtctatgaactcatgcgagcatgttggcagtggaatccctctgaccggccctcctttgctgaaatccaccaagcctttgaaacaatgttccaggaatccagtatctcagacgaagtggaaaaggagctggggaaacaaggcgtccgtggggctgtgagtaccttgctgcaggccccagagctgcccaccaagacgaggacctccaggagagctgcagagcacagagacaccactgacgtgcctgagatgcctcactccaagggccagggagagagcgatcctctggaccatgagcctgccgtgtctccattgctccctcgaaaagagcgaggtcccccggagggcggcctgaatgaagatgagcgccttctccccaaagacaaaaagaccaacttgttcagcgccttgatcaagaagaagaagaagacagccccaacccctcccaaacgcagcagctccttccgggagatggacggccagccggagcgcagaggggccggcgaggaagagggccgagacatcagcaacggggcactggctttcacccccttggacacagctgacccagccaagtccccaaagcccagcaatggggctggggtccccaatggagccctccgggagtccgggggctcaggcttccggtctccccacctgtggaagaagtccagcacgctgaccagcagccgcctagccaccggcgaggaggagggcggtggcagctccagcaagcgcttcctgcgctcttgctccgcctcctgcgttccccatggggccaaggacacggagtggaggtcagtcacgctgcctcgggacttgcagtccacgggaagacagtttgactcgtccacatttggagggcacaaaagtgagaagccggctctgcctcggaagagggcaggggagaacaggtctgaccaggtgacccgaggcacagtaacgcctccccccaggctggtgaaaaagaatgaggaagctgctgatgaggtcttcaaagacatcatggagtccagcccgggctccagcccgcccaacctgactccaaaacccctccggcggcaggtcaccgtggcccctgcctcgggcctcccccacaaggaagaagctggaaagggcagtgccttagggacccctgctgcagctgagccagtgacccccaccagcaaagcaggctcaggtgcaccagggggcaccagcaagggccccgccgaggagtccagagtgaggaggcacaagcactcctctgagtcgccagggagggacaaggggaaattgtccaggctcaaacctgccccgccgcccccaccagcagcctctgcagggaaggctggaggaaagccctcgcagagcccgagccaggaggcggccggggaggcagtcctgggcgcaaagacaaaagccacgagtctggttgatgctgtgaacagtgacgctgccaagcccagccagccgggagagggcctcaaaaagcccgtgctcccggccactccaaagccacagtccgccaagccgtcggggacccccatcagcccagcccccgttccctccacgttgccatcagcatcctcggccctggcaggggaccagccgtcttccaccgccttcatccctctcatatcaacccgagtgtctcttcggaaaacccgccagcctccagagcggatcgccagcggcgccatcaccaagggcgtggtcctggacagcaccgaggcgctgtgcctcgccatctctaggaactccgagcagatggccagccacagcgcagtgctggaggccggcaaaaacctctacacgttctgcgtgagctatgtggattccatccagcaaatgaggaacaagtttgccttccgagaggccatcaacaaactggagaataatctccgggagcttcagatctgcccggcgacagcaggcagtggtccagcggccactcaggacttcagcaagctcctcagttcggtgaaggaaatcagtgacatagtgcagaggtagcagcagtcaggggtcaggtgtcaggcccgtcggagctgcctgcagcacatgcgggctcgcccatacccgtgacagtggctgacaagggactagtgagtcagcaccttggcccaggagctctgcgccaggcagagctgagggccctgtggagtccagctctactacctacgtttgcaccgcctgccctcccgcaccttcctcctccccgctccgtctctgtcctcgaattttatctgtggagttcctgctccgtggactgcagtcggcatgccaggacccgccagccccgctcccacctagtgccccagactgagctctccaggccaggtgggaacggctgatgtggactgtctttttcatttttttctctctggagcccctcctcccccggctgggcctccttcttccacttctccaagaatggaagcctgaactgaggccttgtgtgtcaggccctctgcctgcactccctggccttgcccgtcgtgtgctgaagacatgtttcaagaaccgcatttcgggaagggcatgcacgggcatgcacacggctggtcactctgccctctgctgctgcccggggtggggtgcactcgccatttcctcacgtgcaggacagctcttgatttgggtggaaaacagggtgctaaagccaaccagcctttgggtcctgggcaggtgggagctgaaaaggatcgaggcatggggcatgtcctttccatctgtccacatccccagagcccagctcttgctctcttgtgacgtgcactgtgaatcctggcaagaaagcttgagtctcaagggtggcaggtcactgtcactgccgacatccctcccccagcagaatggaggcaggggacaagggaggcagtggctagtggggtgaacagctggtgccaaatagccccagactgggcccaggcaggtctgcaagggcccagagtgaaccgtcctttcacacatctgggtgccctgaaagggcccttcccctcccccactcctctaagacaaagtagattcttacaaggccctttcctttggaacaagacagccttcacttttctgagttcttgaagcatttcaaagccctgcctctgtgtagccgccctgagagagaatagagctgccactgggcacctgcgcacaggtgggaggaaagggcctggccagtcctggtcctggctgcactcttgaactgggcgaatgtcttatttaattaccgtgagtgacatagcctcatgttctgtgggggtcatcagggagggttaggaaaaccacaaacggagcccctgaaagcctcacgtatttcacagagcacgcctgccatcttctccccgaggctgccccaggccggagcccagatacgggggctgtgactctgggcagggacccggggtctcctggaccttgacagagcagctaactccgagagcagtgggcaggtggccgcccctgaggcttcacgccgggagaagccaccttcccaccccttcataccgcctcgtgccagcagcctcgcacaggccctagctttacgctcatcacctaaacttgtactttatttttctgatagaaatggtttcctctggatcgttttatgcggttcttacagcacatcacctctttgcccccgacggctgtgacgcagccggagggaggcactagtcaccgacagcggccttgaagacagagcaaagcgcccacccaggtcccccgactgcctgtctccatgaggtactggtcccttccttttgttaacgtgatgtgccactatattttacacgtatctcttggtatgcatcttttatagacgctcttttctaagtggcgtgtgcatagcgtcctgccctgccccctcgggggcctgtggtggctccccctctgcttctcggggtccagtgcattttgtttctgtatatgattctctgtggttttttttgaatccaaatctgtcctctgtagtattttttaaataaatcagtgtttacattagaa

SEQ ID NO: 2 - DNA, 10701 bp, Homo sapiens
tggagacagaatggaggtgctgccggactcggaaatggggtccaagggtagccaaggatggctgcagcttcatatgatcagttgttaaagcaagttgaggcactgaagatggagaactcaaatcttcgacaagagctagaagataattccaatcatcttacaaaactggaaactgaggcatctaatatgaaggaagtacttaaacaactacaaggaagtattgaagatgaagctatggcttcttctggacagattgatttattagagcgtcttaaagagcttaacttagatagcagtaatttccctggagtaaaactgcggtcaaaaatgtccctccgttcttatggaagccgggaaggatctgtatcaagccgttctggagagtgcagtcctgttcctatgggttcatttccaagaagagggtttgtaaatggaagcagagaaagtactggatatttagaagaacttgagaaagagaggtcattgcttcttgctgatcttgacaaagaagaaaaggaaaaagactggtattacgctcaacttcagaatctcactaaaagaatagatagtcttcctttaactgaaaatttttccttacaaacagatatgaccagaaggcaattggaatatgaagcaaggcaaatcagagttgcgatggaagaacaactaggtacctgccaggatatggaaaaacgagcacagcgaagaatagccagaattcagcaaatcgaaaaggacatacttcgtatacgacagcttttacagtcccaagcaacagaagcagagaggtcatctcagaacaagcatgaaaccggctcacatgatgctgagcggcagaatgaaggtcaaggagtgggagaaatcaacatggcaacttctggtaatggtcagggttcaactacacgaatggaccatgaaacagccagtgttttgagttctagtagcacacactctgcacctcgaaggctgacaagtcatctgggaaccaaggtggaaatggtgtattcattgttgtcaatgcttggtactcatgataaggatgatatgtcgcgaactttgctagctatgtctagctcccaagacagctgtatatccatgcgacagtctggatgtcttcctctcctcatccagcttttacatggcaatgacaaagactctgtattgttgggaaattcccggggcagtaaagaggctcgggccagggccagtgcagcactccacaacatcattcactcacagcctgatgacaagagaggcaggcgtgaaatccgagtccttcatcttttggaacagatacgcgcttactgtgaaacctgttgggagtggcaggaagctcatgaaccaggcatggaccaggacaaaaatccaatgccagctcctgttgaacatcagatctgtcctgctgtgtgtgttctaatgaaactttcatttgatgaagagcatagacatgcaatgaatgaactagggggactacaggccattgcagaattattgcaagtggactgtgaaatgtatgggcttactaatgaccactacagtattacactaagacgatatgctggaatggctttgacaaacttgacttttggagatgtagccaacaaggctacgctatgctctatgaaaggctgcatgagagcacttgtggcccaactaaaatctgaaagtgaagacttacagcaggttattgcgagtgttttgaggaatttgtcttggcgagcagatgtaaatagtaaaaagacgttgcgagaagttggaagtgtgaaagcattgatggaatgtgctttagaagttaaaaaggaatcaaccctcaaaagcgtattgagtgccttatggaatttgtcagcacattgcactgagaataaagctgatatatgtgctgtagatggtgcacttgcatttttggttggcactcttacttaccggagccagacaaacactttagccattattgaaagtggaggtgggatattacggaatgtgtccagcttgatagctacaaatgaggaccacaggcaaatcctaagagagaacaactgtctacaaactttattacaacacttaaaatctcatagtttgacaatagtcagtaatgcatgtggaactttgtggaatctctcagcaagaaatcctaaagaccaggaagcattatgggacatgggggcagttagcatgctcaagaacctcattcattcaaagcacaaaatgattgctatgggaagtgctgcagctttaaggaatctcatggcaaataggcctgcgaagtacaaggatgccaatattatgtctcctggctcaagcttgccatctcttcatgttaggaaacaaaaagccctagaagcagaattagatgctcagcacttatcagaaacttttgacaatatagacaatttaagtcccaaggcatctcatcgtagtaagcagagacacaagcaaagtctctatggtgattatgtttttgacaccaatcgacatgatgataataggtcagacaattttaatactggcaacatgactgtcctttcaccatatttgaatactacagtgttacccagctcctcttcatcaagaggaagcttagatagttctcgttctgaaaaagatagaagtttggagagagaacgcggaattggtctaggcaactaccatccagcaacagaaaatccaggaacttcttcaaagcgaggtttgcagatctccaccactgcagcccagattgccaaagtcatggaagaagtgtcagccattcatacctctcaggaagacagaagttctgggtctaccactgaattacattgtgtgacagatgagagaaatgcacttagaagaagctctgctgcccatacacattcaaacacttacaatttcactaagtcggaaaattcaaataggacatgttctatgccttatgccaaattagaatacaagagatcttcaaatgatagtttaaatagtgtcagtagtagtgatggttatggtaaaagaggtcaaatgaaaccctcgattgaatcctattctgaagatgatgaaagtaagttttgcagttatggtcaatacccagccgacctagcccataaaatacatagtgcaaatcatatggatgataatgatggagaactagatacaccaataaattatagtcttaaatattcagatgagcagttgaactctggaaggcaaagtccttcacagaatgaaagatgggcaagacccaaacacataatagaagatgaaataaaacaaagtgagcaaagacaatcaaggaatcaaagtacaacttatcctgtttatactgagagcactgatgataaacacctcaagttccaaccacattttggacagcaggaatgtgtttctccatacaggtcacggggagccaatggttcagaaacaaatcgagtgggttctaatcatggaattaatcaaaatgtaagccagtctttgtgtcaagaagatgactatgaagatgataagcctaccaattatagtgaacgttactctgaagaagaacagcatgaagaagaagagagaccaacaaattatagcataaaatataatgaagagaaacgtcatgtggatcagcctattgattatagtttaaaatatgccacagatattccttcatcacagaaacagtcattttcattctcaaagagttcatctggacaaagcagtaaaaccgaacatatgtcttcaagcagtgagaatacgtccacaccttcatctaatgccaagaggcagaatcagctccatccaagttctgcacagagtagaagtggtcagcctcaaaaggctgccacttgcaaagtttcttctattaaccaagaaacaatacagacttattgtgtagaagatactccaatatgtttttcaagatgtagttcattatcatctttgtcatcagctgaagatgaaataggatgtaatcagacgacacaggaagcagattctgctaataccctgcaaatagcagaaataaaagaaaagattggaactaggtcagctgaagatcctgtgagcgaagttccagcagtgtcacagcaccctagaaccaaatccagcagactgcagggttctagtttatcttcagaatcagccaggcacaaagctgttgaattttcttcaggagcgaaatctccctccaaaagtggtgctcagacacccaaaagtccacctgaacactatgttcaggagaccccactcatgtttagcagatgtacttctgtcagttcacttgatagttttgagagtcgttcgattgccagctccgttcagagtgaaccatgcagtggaatggtaagtggcattataagccccagtgatcttccagatagccctggacaaaccatgccaccaagcagaagtaaaacacctccaccacctcctcaaacagctcaaaccaagcgagaagtacctaaaaataaagcacctactgctgaaaagagagagagtggacctaagcaagctgcagtaaatgctgcagttcagagggtccaggttcttccagatgctgatactttattacattttgccacggaaagtactccagatggattttcttgttcatccagcctgagtgctctgagcctcgatgagccatttatacagaaagatgtggaattaagaataatgcctccagttcaggaaaatgacaatgggaatgaaacagaatcagagcagcctaaagaatcaaatgaaaaccaagagaaagaggcagaaaaaactattgattctgaaaaggacctattagatgattcagatgatgatgatattgaaatactagaagaatgtattatttctgccatgccaacaaagtcatcacgtaaagcaaaaaagccagcccagactgcttcaaaattacctccacctgtggcaaggaaaccaagtcagctgcctgtgtacaaacttctaccatcacaaaacaggttgcaaccccaaaagcatgttagttttacaccgggggatgatatgccacgggtgtattgtgttgaagggacacctataaacttttccacagctacatctctaagtgatctaacaatcgaatcccctccaaatgagttagctgctggagaaggagttagaggaggggcacagtcaggtgaatttgaaaaacgagataccattcctacagaaggcagaagtacagatgaggctcaaggaggaaaaacctcatctgtaaccatacctgaattggatgacaataaagcagaggaaggtgatattcttgcagaatgcattaattctgctatgcccaaagggaaaagtcacaagcctttccgtgtgaaaaagataatggaccaggtccagcaagcatctgcgtcttcttctgcacccaacaaaaatcagttagatggtaagaaaaagaaaccaacttcaccagtaaaacctataccacaaaatactgaatataggacacgtgtaagaaaaaatgcagactcaaaaaataatttaaatgctgagagagttttctcagacaacaaagattcaaagaaacagaatttgaaaaataattccaaggtcttcaatgataagctcccaaataatgaagatagagtcagaggaagttttgcttttgattcacctcatcattacacgcctattgaaggaactccttactgtttttcacgaaatgattctttgagttctctagattttgatgatgatgatgttgacctttccagggaaaaggctgaattaagaaaggcaaaagaaaataaggaatcagaggctaaagttaccagccacacagaactaacctccaaccaacaatcagctaataagacacaagctattgcaaagcagccaataaatcgaggtcagcctaaacccatacttcagaaacaatccacttttccccagtcatccaaagacataccagacagaggggcagcaactgatgaaaagttacagaattttgctattgaaaatactccggtttgcttttctcataattcctctctgagttctctcagtgacattgaccaagaaaacaacaataaagaaaatgaacctatcaaagagactgagccccctgactcacagggagaaccaagtaaacctcaagcatcaggctatgctcctaaatcatttcatgttgaagataccccagtttgtttctcaagaaacagttctctcagttctcttagtattgactctgaagatgacctgttgcaggaatgtataagctccgcaatgccaaaaaagaaaaagccttcaagactcaagggtgataatgaaaaacatagtcccagaaatatgggtggcatattaggtgaagatctgacacttgatttgaaagatatacagagaccagattcagaacatggtctatcccctgattcagaaaattttgattggaaagctattcaggaaggtgcaaattccatagtaagtagtttacatcaagctgctgctgctgcatgtttatctagacaagcttcgtctgattcagattccatcctttccctgaaatcaggaatctctctgggatcaccatttcatcttacacctgatcaagaagaaaaaccctttacaagtaataaaggcccacgaattctaaaaccaggggagaaaagtacattggaaactaaaaagatagaatctgaaagtaaaggaatcaaaggaggaaaaaaagtttataaaagtttgattactggaaaagttcgatctaattcagaaatttcaggccaaatgaaacagccccttcaagcaaacatgccttcaatctctcgaggcaggacaatgattcatattccaggagttcgaaatagctcctcaagtacaagtcctgtttctaaaaaaggcccaccccttaagactccagcctccaaaagccctagtgaaggtcaaacagccaccacttctcctagaggagccaagccatctgtgaaatcagaattaagccctgttgccaggcagacatcccaaataggtgggtcaagtaaagcaccttctagatcaggatctagagattcgaccccttcaagacctgcccagcaaccattaagtagacctatacagtctcctggccgaaactcaatttcccctggtagaaatggaataagtcctcctaacaaattatctcaacttccaaggacatcatcccctagtactgcttcaactaagtcctcaggttctggaaaaatgtcatatacatctccaggtagacagatgagccaacagaaccttaccaaacaaacaggtttatccaagaatgccagtagtattccaagaagtgagtctgcctccaaaggactaaatcagatgaataatggtaatggagccaataaaaaggtagaactttctagaatgtcttcaactaaatcaagtggaagtgaatctgatagatcagaaagacctgtattagtacgccagtcaactttcatcaaagaagctccaagcccaaccttaagaagaaaattggaggaatctgcttcatttgaatctctttctccatcatctagaccagcttctcccactaggtcccaggcacaaactccagttttaagtccttcccttcctgatatgtctctatccacacattcgtctgttcaggctggtggatggcgaaaactcccacctaatctcagtcccactatagagtataatgatggaagaccagcaaagcgccatgatattgcacggtctcattctgaaagtccttctagacttccaatcaataggtcaggaacctggaaacgtgagcacagcaaacattcatcatcccttcctcgagtaagcacttggagaagaactggaagttcatcttcaattctttctgcttcatcagaatccagtgaaaaagcaaaaagtgaggatgaaaaacatgtgaactctatttcaggaaccaaacaaagtaaagaaaaccaagtatccgcaaaaggaacatggagaaaaataaaagaaaatgaattttctcccacaaatagtacttctcagaccgtttcctcaggtgctacaaatggtgctgaatcaaagactctaatttatcaaatggcacctgctgtttctaaaacagaggatgtttgggtgagaattgaggactgtcccattaacaatcctagatctggaagatctcccacaggtaatactcccccggtgattgacagtgtttcagaaaaggcaaatccaaacattaaagattcaaaagataatcaggcaaaacaaaatgtgggtaatggcagtgttcccatgcgtaccgtgggtttggaaaatcgcctgaactcctttattcaggtggatgcccctgaccaaaaaggaactgagataaaaccaggacaaaataatcctgtccctgtatcagagactaatgaaagttctatagtggaacgtaccccattcagttctagcagctcaagcaaacacagttcacctagtgggactgttgctgccagagtgactccttttaattacaacccaagccctaggaaaagcagcgcagatagcacttcagctcggccatctcagatcccaactccagtgaataacaacacaaagaagcgagattccaaaactgacagcacagaatccagtggaacccaaagtcctaagcgccattctgggtcttaccttgtgacatctgtttaaaagagaggaagaatgaaactaagaaaattctatgttaattacaactgctatatagacattttgtttcaaatgaaactttaaaagactgaaaaattttgtaaataggtttgattcttgttagagggtttttgttctggaagccatatttgatagtatactttgtcttcactggtcttattttgggaggcactcttgatggttaggaaaaaaatagtaaagccaagtatgtttgtacagtatgttttacatgtatttaaagtagcatcccatcccaacttcctttaattattgcttgtcttaaaataatgaacactacagatagaaaatatgatatattgctgttatcaatcatttctagattataaactgactaaacttacatcagggaaaaattggtatttatgcaaaaaaaaatgtttttgtccttgtgagtccatctaacatcataattaatcatgtggctgtgaaattcacagtaatatggttcccgatgaacaagtttacccagcctgctttgctttactgcatgaatgaaactgatggttcaatttcagaagtaatgattaacagttatgtggtcacatgatgtgcatagagatagctacagtgtaataatttacactattttgtgctccaaacaaaacaaaaatctgtgtaactgtaaaacattgaatgaaactattttacctgaactagattttatctgaaagtaggtagaatttttgctatgctgtaatttgttgtatattctggtatttgaggtgagatggctgctcttttattaatgagacatgaattgtgtctcaacagaaactaaatgaacatttcagaataaattattgctgtatgtaaactgttactgaaattggtatttgtttgaagggtcttgtttcacatttgtattaataattgtttaaaatgcctcttttaaaagcttatataaatttttttcttcagcttctatgcattaagagtaaaattcctcttactgtaataaaaacaattgaagaagactgttgccacttaaccattccatgcgttggcacttatctattcctgaaatttcttttatgtgattagctcatcttgatttttaatatttttccacttaaacttttttttcttactccactggagctcagtaaaagtaaattcatgtaatagcaatgcaagcagcctagcacagactaagcattgagcataataggcccacataatttcctctttcttaatattatagaattctgtacttgaaattgattcttagacattgcagtctcttcgaggctttacagtgtaaactgtcttgccccttcatcttcttgttgcaactgggtctgacatgaacactttttatcaccctgtatgttagggcaagatctcagcagtgaagtataatcagcactttgccatgctcagaaaattcaaatcacatggaactttagaggtagatttaatacgattaagatattcagaagtatattttagaatccctgcctgttaaggaaactttatttgtggtaggtacagttctggggtacatgttaagtgtccccttatacagtggagggaagtcttccttcctgaaggaaaataaactgacacttattaactaagataatttacttaatatatcttccctgatttgttttaaaagatcagagggtgactgatgatacatgcatacatatttgttgaataaatgaaaatttatttttagtgataagattcatacactctgtatttggggagggaaaacctttttaagcatggtggggcactcagataggagtgaatacacctacctggtgccttgaaaatcacatcaagtagttaattatctaccccttacctgtgtttataacttccaggtaatgagaatgattttttttaaagctaaaatgccagtaaataaaagtgctatgacttgagctaagatatttgactccaatgcctgtactgtgtctactgcaccactttgtaaacacttcaatttactatctttgaaatgattgacctttaaatttttgccaaatgttatctgaaattgtctatgaataccatctacttctgttgttttcccaggcttccataaacaatggagatacatgc

SEQ ID NO: 3 - DNA, 13147 bp, Homo sapiens
ccggagcccgagccgaagggcgagccgcaaacgctaagtcgctggccattggtggacatggcgcaggcgcgtttgctccgacgggccgaatgttttggggcagtgttttgagcgcggagaccgcgtgatactggatgcgcatgggcataccgtgctctgcggctgcttggcgttgcttcttcctccagaagtgggcgctgggcagtcacgcagggtttgaaccggaagcgggagtaggtagctgcgtggctaacggagaaaagaagccgtggccgcgggaggaggcgagaggagtcgggatctgcgctgcagccaccgccgcggttgatactactttgaccttccgagtgcagtgacagtgatgtgtgttctgaaattgtgaaccatgagtctagtacttaatgatctgcttatctgctgccgtcaactagaacatgatagagctacagaacgaaagaaagaagttgagaaatttaagcgcctgattcgagatcctgaaacaattaaacatctagatcggcattcagattccaaacaaggaaaatatttgaattgggatgctgtttttagatttttacagaaatatattcagaaagaaacagaatgtctgagaatagcaaaaccaaatgtatcagcctcaacacaagcctccaggcagaaaaagatgcaggaaatcagtagtttggtcaaatacttcatcaaatgtgcaaacagaagagcacctaggctaaaatgtcaagaactcttaaattatatcatggatacagtgaaagattcatctaatggtgctatttacggagctgattgtagcaacatactactcaaagacattctttctgtgagaaaatactggtgtgaaatatctcagcaacagtggttagaattgttctctgtgtacttcaggctctatctgaaaccttcacaagatgttcatagagttttagtggctagaataattcatgctgttaccaaaggatgctgttctcagactgacggattaaattccaaatttttggactttttttccaaggctattcagtgtgcgagacaagaaaagagctcttcaggtctaaatcatatcttagcagctcttactatcttcctcaagactttggctgtcaactttcgaattcgagtgtgtgaattaggagatgaaattcttcccactttgctttatatttggactcaacataggcttaatgattctttaaaagaagtcattattgaattatttcaactgcaaatttatatccatcatccgaaaggagccaaaacccaagaaaaaggtgcttatgaatcaacaaaatggagaagtattttatacaacttatatgatctgctagtgaatgagataagtcatataggaagtagaggaaagtattcttcaggatttcgtaatattgccgtcaaagaaaatttgattgaattgatggcagatatctgtcaccaggtttttaatgaagataccagatccttggagatttctcaatcttacactactacacaaagagaatctagtgattacagtgtcccttgcaaaaggaagaaaatagaactaggctgggaagtaataaaagatcaccttcagaagtcacagaatgattttgatcttgtgccttggctacagattgcaacccaattaatatcaaagtatcctgcaagtttacctaactgtgagctgtctccattactgatgatactatctcagcttctaccccaacagcgacatggggaacgtacaccatatgtgttacgatgccttacggaagttgcattgtgtcaagacaagaggtcaaacctagaaagctcacaaaagtcagatttattaaaactctggaataaaatttggtgtattacctttcgtggtataagttctgagcaaatacaagctgaaaactttggcttacttggagccataattcagggtagtttagttgaggttgacagagaattctggaagttatttactgggtcagcctgcagaccttcatgtcctgcagtatgctgtttgactttggcactgaccaccagtatagttccaggaacggtaaaaatgggaatagagcaaaatatgtgtgaagtaaatagaagcttttctttaaaggaatcaataatgaaatggctcttattctatcagttagagggtgacttagaaaatagcacagaagtgcctccaattcttcacagtaattttcctcatcttgtactggagaaaattcttgtgagtctcactatgaaaaactgtaaagctgcaatgaattttttccaaagcgtgccagaatgtgaacaccaccaaaaagataaagaagaactttcattctcagaagtagaagaactatttcttcagacaacttttgacaagatggactttttaaccattgtgagagaatgtggtatagaaaagcaccagtccagtattggcttctctgtccaccagaatctcaaggaatcactggatcgctgtcttctgggattatcagaacagcttctgaataattactcatctgagattacaaattcagaaactcttgtccggtgttcacgtcttttggtgggtgtccttggctgctactgttacatgggtgtaatagctgaagaggaagcatataagtcagaattattccagaaagccaagtctctaatgcaatgtgcaggagaaagtatcactctgtttaaaaataagacaaatgaggaattcagaattggttccttgagaaatatgatgcagctatgtacacgttgcttgagcaactgtaccaagaagagtccaaataagattgcatctggctttttcctgcgattgttaacatcaaagctaatgaatgacattgcagatatttgtaaaagtttagcatccttcatcaaaaagccatttgaccgtggagaagtagaatcaatggaagatgatactaatggaaatctaatggaggtggaggatcagtcatccatgaatctatttaacgattaccctgatagtagtgttagtgatgcaaacgaacctggagagagccaaagtaccataggtgccattaatcctttagctgaagaatatctgtcaaagcaagatctacttttcttagacatgctcaagttcttgtgtttgtgtgtaactactgctcagaccaatactgtgtcctttagggcagctgatattcggaggaaattgttaatgttaattgattctagcacgctagaacctaccaaatccctccacctgcatatgtatctaatgcttttaaaggagcttcctggagaagagtaccccttgccaatggaagatgttcttgaacttctgaaaccactatccaatgtgtgttctttgtatcgtcgtgaccaagatgtttgtaaaactattttaaaccatgtccttcatgtagtgaaaaacctaggtcaaagcaatatggactctgagaacacaagggatgctcaaggacagtttcttacagtaattggagcattttggcatctaacaaaggagaggaaatatatattctctgtaagaatggccctagtaaattgccttaaaactttgcttgaggctgatccttattcaaaatgggccattcttaatgtaatgggaaaagactttcctgtaaatgaagtatttacacaatttcttgctgacaatcatcaccaagttcgcatgttggctgcagagtcaatcaatagattgttccaggacacgaagggagattcttccaggttactgaaagcacttcctttgaagcttcagcaaacagcttttgaaaatgcatacttgaaagctcaggaaggaatgagagaaatgtcccatagtgctgagaaccctgaaactttggatgaaatttataatagaaaatctgttttactgacgttgatagctgtggttttatcctgtagccctatctgcgaaaaacaggctttgtttgccctgtgtaaatctgtgaaagagaatggattagaacctcaccttgtgaaaaaggttttagagaaagtttctgaaacttttggatatagacgtttagaagactttatggcatctcatttagattatctggttttggaatggctaaatcttcaagatactgaatacaacttatcttcttttccttttattttattaaactacacaaatattgaggatttctatagatcttgttataaggttttgattccacatctggtgattagaagtcattttgatgaggtgaagtccattgctaatcagattcaagaggactggaaaagtcttctaacagactgctttccaaagattcttgtaaatattcttccttattttgcctatgagggtaccagagacagtgggatggcacagcaaagagagactgctaccaaggtctatgatatgcttaaaagtgaaaacttattgggaaaacagattgatcacttattcattagtaatttaccagagattgtggtggagttattgatgacgttacatgagccagcaaattctagtgccagtcagagcactgacctctgtgacttttcaggggatttggatcctgctcctaatccacctcattttccatcgcatgtgattaaagcaacatttgcctatatcagcaattgtcataaaaccaagttaaaaagcattttagaaattctttccaaaagccctgattcctatcagaaaattcttcttgccatatgtgagcaagcagctgaaacaaataatgtttataagaagcacagaattcttaaaatatatcacctgtttgttagtttattactgaaagatataaaaagtggcttaggaggagcttgggcctttgttcttcgagacgttatttatactttgattcactatatcaaccaaaggccttcttgtatcatggatgtgtcattacgtagcttctccctttgttgtgacttattaagtcaggtttgccagacagccgtgacttactgtaaggatgctctagaaaaccatcttcatgttattgttggtacacttataccccttgtgtatgagcaggtggaggttcagaaacaggtattggacttgttgaaatacttagtgatagataacaaggataatgaaaacctctatatcacgattaagcttttagatccttttcctgaccatgttgtttttaaggatttgcgtattactcagcaaaaaatcaaatacagtagaggacccttttcactcttggaggaaattaaccattttctctcagtaagtgtttatgatgcacttccattgacaagacttgaaggactaaaggatcttcgaagacaactggaactacataaagatcagatggtggacattatgagagcttctcaggataatccgcaagatgggattatggtgaaactagttgtcaatttgttgcagttatccaagatggcaataaaccacactggtgaaaaagaagttctagaggctgttggaagctgcttgggagaagtgggtcctatagatttctctaccatagctatacaacatagtaaagatgcatcttataccaaggcccttaagttatttgaagataaagaacttcagtggaccttcataatgctgacctacctgaataacacactggtagaagattgtgtcaaagttcgatcagcagctgttacctgtttgaaaaacattttagccacaaagactggacatagtttctgggagatttataagatgacaacagatccaatgctggcctatctacagccttttagaacatcaagaaaaaagtttttagaagtacccagatttgacaaagaaaacccttttgaaggcctggatgatataaatctgtggattcctctaagtgaaaatcatgacatttggataaagacactgacttgtgcttttttggacagtggaggcacaaaatgtgaaattcttcaattattaaagccaatgtgtgaagtgaaaactgacttttgtcagactgtacttccatacttgattcatgatattttactccaagatacaaatgaatcatggagaaatctgctttctacacatgttcagggatttttcaccagctgtcttcgacacttctcgcaaacgagccgatccacaacccctgcaaacttggattcagagtcagagcactttttccgatgctgtttggataaaaaatcacaaagaacaatgcttgctgttgtggactacatgagaagacaaaagagaccttcttcaggaacaatttttaatgatgctttctggctggatttaaattatctagaagttgccaaggtagctcagtcttgtgctgctcactttacagctttactctatgcagaaatctatgcagataagaaaagtatggatgatcaagagaaaagaagtcttgcatttgaagaaggaagccagaatacaactatttctagcttgagtgaaaaaagtaaagaagaaactggaataagtttacaggatcttctcttagaaatctacagaagtataggggagccagatagtttgtatggctgtggtggagggaagatgttacaacccattactagactacgaacatatgaacacgaagcaatgtggggcaaagccctagtaacatatgacctcgaaacagcaatcccctcatcaacacgccaggcaggaatcattcaggccttgcagaatttgggactctgccatattctttccgtctatttaaaaggattggattatgaaaataaagactggtgtcctgaactagaagaacttcattaccaagcagcatggaggaatatgcagtgggaccattgcacttccgtcagcaaagaagtagaaggaaccagttaccatgaatcattgtacaatgctctacaatctctaagagacagagaattctctacattttatgaaagtctcaaatatgccagagtaaaagaagtggaagagatgtgtaagcgcagccttgagtctgtgtattcgctctatcccacacttagcaggttgcaggccattggagagctggaaagcattggggagcttttctcaagatcagtcacacatagacaactctctgaagtatatattaagtggcagaaacactcccagcttctcaaggacagtgattttagttttcaggagcctatcatggctctacgcacagtcattttggagatcctgatggaaaaggaaatggacaactcacaaagagaatgtattaaggacattctcaccaaacaccttgtagaactctctatactggccagaactttcaagaacactcagctccctgaaagggcaatatttcaaattaaacagtacaattcagttagctgtggagtctctgagtggcagctggaagaagcacaagtattctgggcaaaaaaggagcagagtcttgccctgagtattctcaagcaaatgatcaagaagttggatgccagctgtgcagcgaacaatcccagcctaaaacttacatacacagaatgtctgagggtttgtggcaactggttagcagaaacgtgcttagaaaatcctgcggtcatcatgcagacctatctagaaaaggcagtagaagttgctggaaattatgatggagaaagtagtgatgagctaagaaatggaaaaatgaaggcatttctctcattagcccggttttcagatactcaataccaaagaattgaaaactacatgaaatcatcggaatttgaaaacaagcaagctctcctgaaaagagccaaagaggaagtaggtctccttagggaacataaaattcagacaaacagatacacagtaaaggttcagcgagagctggagttggatgaattagccctgcgtgcactgaaagaggatcgtaaacgcttcttatgtaaagcagttgaaaattatatcaactgcttattaagtggagaagaacatgatatgtgggtattccgactttgttccctctggcttgaaaattctggagtttctgaagtcaatggcatgatgaaggcaaacggaatgaagattccaacatataaatttttgcctcttatgtaccaattggctgctagaatggggaccaagatgatgggaggcctaggatttcatgaagtcctcaataatctaatctctagaatttcaatggatcacccccatcacactttgtttattatactggccttagcaaatgcaaacagagatgaatttctgactaaaccagaggtagccagaagaagcagaataactaaaaatgtgcctaaacaaagctctcagcttgatgaggatcgaacagaggctgcaaatagaataatatgtactatcagaagtaggagacctcagatggtcagaagtgttgaggcactttgtgatgcttatattatattagcaaacttagatgccactcagtggaagactcagagaaaaggcataaatattccagcagaccagccaattactaaacttaagaatttagaagatgttgttgtccctactatggaaattaaggtggaccacacaggagaatatggaaatctggtgactatacagtcatttaaagcagaatttcgcttagcaggaggtgtaaatttaccaaaaataatagattgtgtaggttccgatggcaaggagaggagacagcttgttaagggccgtgatgacctgagacaagatgctgtcatgcaacaggtcttccagatgtgtaatacattactgcagagaaacacggaaactaggaagaggaaattaactatctgtacttataaggtggttcccctctctcagcgaagtggtgttcttgaatggtgcacaggaactgtccccattggtgaatttcttgttaacaatgaagatggtgctcataaaagatacaggccaaatgatttcagtgcctttcagtgccaaaagaaaatgatggaggtgcaaaaaaagtcttttgaagagaaatatgaagtcttcatggatgtttgccaaaattttcaaccagttttccgttacttctgcatggaaaaattcttggatccagctatttggtttgagaagcgattggcttatacgcgcagtgtagctacttcttctattgttggttacatacttggacttggtgatagacatgtacagaatatcttgataaatgagcagtcagcagaacttgtacatatagatctaggtgttgcttttgaacagggcaaaatccttcctactcctgagacagttccttttagactcaccagagatattgtggatggcatgggcattacgggtgttgaaggtgtcttcagaagatgctgtgagaaaaccatggaagtgatgagaaactctcaggaaactctgttaaccattgtagaggtccttctatatgatccactctttgactggaccatgaatcctttgaaagctttgtatttacagcagaggccggaagatgaaactgagcttcaccctactctgaatgcagatgaccaagaatgcaaacgaaatctcagtgatattgaccagagtttcaacaaagtagctgaacgtgtcttaatgagactacaagagaaactgaaaggagtggaagaaggcactgtgctcagtgttggtggacaagtgaatttgctcatacagcaggccatagaccccaaaaatctcagccgacttttcccaggatggaaagcttgggtgtgatcttcagtatatgaattaccctttcattcagcctttagaaattatattttagcctttatttttaacctgccaacatactttaagtagggattaatatttaagtgaactattgtgggtttttttgaatgttggttttaatacttgatttaatcaccactcaaaaatgttttgatggtcttaaggaacatctctgctttcactctttagaaataatggtcattcgggctgggcgcagcggctcacgcctgtaatcccagcactttgggaggccgaggtgagcggatcacaaggtcaggagttcgagaccagcctggccaagagaccagcctggccagtatggtgaaaccctgtctctactaaaaatacaaaaattagccgagcatggtggcgggcacctgtaatcccagctactcgagaggctgaggcaggagaatctcttgaacctgggaggtgaaggttgctgtgggccaaaatcatgccattgcactccagcctgggtgacaagagcgaaactccatctcaaaaaaaaaaaaaaaaaaacagaaacgtatttggatttttcctagtaagatcactcagtgttactaaataatgaagttgttatggagaacaaatttcaaagacacagttagtgtagttactatttttttaagtgtgtattaaaacttctcattctattctctttatcttttaagcccttctgtactgtccatgtatgttatctttctgtgataacttcatagattgccttctagttcatgaattctcttgtcagatgtatataatctcttttaccctatccattgggcttcttctttcagaaattgtttttcatttctaattatgcatcatttttcagatctctgtttcttgatgtcatttttaatgtttttttaatgttttttatgtcactaattattttaaatgtctgtacttgatagacactgtaatagttctattaaatttagttcctgctgtttatatctgttgatttttgtatttgataggctgttcatccagttttgtctttttgaaaagtgagtttattttcagcaaggctttatctatgggaatcttgagtgtctgtttatgtcatattcccagggctgttgctgcacacaagcccattcttattttaatttcttggctttagggtttccatacctgaagtgtagcataaatactgataggagatttcccaggccaaggcaaacacacttcctcctcatctccttgtgctagtgggcagaatatttgattgatgcctttttcactgagagtataagcttccatgtgtcccacctttatggcaggggtggaaggaggtacatttaattcccactgcctgcctttggcaagccctgggttctttgctccccatatagatgtctaagctaaaagccgtgggttaatgagactggcaaattgttccaggacagctacagcatcagctcacatattcacctctctggtttttcattcccctcatttttttctgagacagagtcttgctctgtcacccaggctggagtgcagtggcatgatctcagctcactgaaacctctgcctcctgggttcaagcaattctcctgcctcagcctcccgagtagctgggactacaggcgtgtgccaacacgcccggctaattttttgtatttttattagagacggagtttcaccgtgttagccaggatggtctcgatcgcttgacctcgtgatccaccctcctcggcctcccaaagtgctgggattacaggtgtgagccaccgcgcccggcctcattcccctcatttttgaccgtaaggatttcccctttcttgtaagttctgctatgtatttaaaagaatgttttctacattttatccagcatttctctgtgttctgttggaagggaagggcttaggtatctagtttgatacataggtagaagtggaacatttctctgtcccccagctgtcatcatataagataaacatcagataaaaagccacctgaaagtaaaactactgactcgtgtattagtgagtataatctcttctccatccttaggaaaatgttcatcccagctgcggagattaacaaatgggtgattgagctttctcctcgtatttggaccttgaaggttatataaatttttttcttatgaagagttggcatttctttttattgccaatggcaggcactcattcatatttgatctcctcaccttcccctcccctaaaaccaatctccagaactttttggactataaatttcttggtttgacttctggagaactgttcagaatattactttgcatttcaaattacaaacttaccttggtgtatctttttcttacaagctgcctaaatgaatatttggtatatattggtagttttattactatagtaaatcaaggaaatgcagtaaacttaaaatgtctttaagaaagccctgaaatcttcatgggtgaaattagaaattatcaactagataatagtatagataaatgaatttgtagctaattcttgctagttgttgcatccagagagctttgaataacatcattaatctactctttagccttgcatggtatgctatgaggctcctgttctgttcaagtattctaatcaatggctttgaaaagtttatcaaatttacatacagatcacaagcctaggagaaataactaattcacagatgacagaattaagattataaaagattttttttttgtaattttagtagagacagggttgccattgtattccagccttggcgacagagcaagactctgcctcaaaaaaaaaaaaaaaaaggttttggcaagctggaactctttctgcaaatgactaagatagaaaactgccaaggacaaatgaggagtagttagattttgaaaatattaatcatagaatagttgttgtatgctaagtcactgacccatattatgtacagcatttctgatctttactttgcaagattagtgatactatcccaatacactgctggagaaatcagaatttggagaaataagttgtccaaggcaagaagatagtaaattataagtacaagtgtaatatggacagtatctaacttgaaaagatttcaggcgaaaagaatctggggtttgccagtcagttgctcaaaaggtcaatgaaaaccaaatagtgaagctatcagagaagctaataaattatagactgcttgaacagttgtgtccagattaagggagataatagctttcccaccctactttgtgcaggtcatacctccccaaagtgtttacctaatcagtaggttcacaaactcttggtcattatagtatatgcctaaaatgtatgcacttaggaatgctaaaaatttaaatatggtctaaagcaaataaaagcaaagaggaaaaactttggacagcgtaaagactagaatagtcttttaaaaagaaagccagtatattggtttgaaatatagagatgtgtcccaatttcaagtattttaattgcaccttaatgaaattatctattttctatagattttagtactattgaatgtattactttactgttacctgaatttattataaagtgtttttgaataaataattctaaaagc

SEQ ID NO: 4 - DNA, 8228 bp, Homo sapiens
gcctccacacggctccgtcgggcgccgcgctcttccggcagcggtagctttggagacgccgggaacccgcgttggcgtggttgactagtgcctcgcagcctcagcatgggggaacatggcctggagctggcttccatgatccccgccctgcgggagctgggcagtgccacaccagaggaatataatacagttgtacagaagccaagacaaattctgtgtcaattcattgaccggatacttacagatgtaaatgttgttgctgtagaacttgtaaagaaaactgactctcagccaacctccgtgatgttgcttgatttcatccagcatatcatgaaatcctccccacttatgtttgtaaatgtgagtggaagccatgaggccaaaggcagttgtattgaattcagtaattggatcataacgagacttctgcggattgcagcaactccctcctgtcatttgttacacaagaaaatctgtgaagtcatctgttcattattatttctttttaaaagcaagagtcctgctatttttggggtactcacaaaagaattattacaactttttgaagacttggtttacctccatagaagaaatgtgatgggtcatgctgtggaatggccagtggtcatgagccgatttttaagtcaattagatgaacacatgggatatttacaatcagctcctttgcagttgatgagtatgcaaaatttagaatttattgaagtcactttattaatggttcttactcgtattattgcaattgtgttttttagaaggcaagaactcttactttggcagataggttgtgttctgctagagtatggtagtccaaaaattaaatccctagcaattagctttttaacagaactttttcagcttggaggactaccagcacaaccagctagcacttttttcagctcatttttggaattattaaaacaccttgtagaaatggatactgaccaattgaaactctatgaagagccattatcaaagctgataaagacactatttccctttgaagcagaagcttatagaaatattgaacctgtctatttaaatatgctgctggaaaaactctgtgtcatgtttgaagacggtgtgctcatgcggcttaagtctgatttgctaaaagcagctttgtgccatttactgcagtatttccttaaatttgtgccagctgggtatgaatctgctttacaagtcaggaaggtctatgtgagaaatatttgtaaagctcttttggatgtgcttggaattgaggtagatgcagagtacttgttgggcccactttatgcagctttgaaaatggaaagtatggaaatcattgaggagattcaatgccaaactcaacaggaaaacctcagcagtaatagtgatggaatatcacccaaaaggcgtcgtctcagctcgtctctaaacccttctaaaagagcaccaaaacagactgaggaaattaaacatgtggacatgaaccaaaagagcatattatggagtgcactgaaacagaaagctgaatcccttcagatttcccttgaatacagtggcctaaagaatcctgttattgagatgttagaaggaattgctgttgtcttacaactgactgctctgtgtactgttcattgttctcatcaaaacatgaactgccgtactttcaaggactgtcaacataaatccaagaagaaaccttctgtagtgataacttggatgtcattggatttttacacaaaagtgcttaagagctgtagaagtttgttagaatctgttcagaaactggacctggaggcaaccattgataaggtggtgaaaatttatgatgctttgatttatatgcaagtaaacagttcatttgaagatcatatcctggaagatttatgtggtatgctctcacttccatggatttattcccattctgatgatggctgtttaaagttgaccacatttgccgctaatcttctaacattaagctgtaggatttcagatagctattcaccacaggcacaatcacgatgtgtgtttcttctgactctgtttccaagaagaatattccttgagtggagaacagcagtttacaactgggccctgcagagctcccatgaagtaatccgggctagttgtgttagtggattttttatcttattgcagcagcagaattcttgtaacagagttcccaagattcttatagataaagtcaaagatgattctgacattgtcaagaaagaatttgcttctatacttggtcaacttgtctgtactcttcacggcatgttttatctgacaagttctttaacagaacctttctctgaacacggacatgtggacctcttctgtaggaacttgaaagccacttctcaacatgaatgttcatcttctcaactaaaagcttctgtctgcaagccattccttttcctactgaaaaaaaaaatacctagtccagtaaaacttgctttcatagataatctacatcatctttgtaagcatcttgattttagagaagatgaaacagatgtaaaagcagttcttggaactttattaaatttaatggaagatccagacaaagatgttagagtggcttttagtggaaatatcaagcacatattggaatccttggactctgaagatggatttataaaggagctttttgtcttaagaatgaaggaagcatatacacatgcccaaatatcaagaaataatgagctgaaggataccttgattcttacaacaggggatattggaagggccgcaaaaggagatttggtaccatttgcactcttacacttattgcattgtttgttatccaagtcagcatctgtctctggagcagcatacacagaaattagagctctggttgcagctaaaagtgttaaactgcaaagttttttcagccagtataagaaacccatctgtcagtttttggtagaatcccttcactctagtcagatgacagcacttccgaatactccatgccagaatgctgacgtgcgaaaacaagatgtggctcaccagagagaaatggctttaaatacgttgtctgaaattgccaacgttttcgactttcctgatcttaatcgttttcttactaggacattacaagttctactacctgatcttgctgccaaagcaagccctgcagcttctgctctcattcgaactttaggaaaacaattaaatgtcaatcgtagagagattttaataaacaacttcaaatatattttttctcatttggtctgttcttgttccaaagatgaattagaacgtgcccttcattatctgaagaatgaaacagaaattgaactggggagcctgttgagacaagatttccaaggattgcataatgaattattgctgcgtattggagaacactatcaacaggtttttaatggtttgtcaatacttgcctcatttgcatccagtgatgatccatatcagggcccgagagatatcatatcacctgaactgatggctgattatttacaacccaaattgttgggcattttggctttttttaacatgcagttactgagctctagtgttggcattgaagataagaaaatggccttgaacagtttgatgtctttgatgaagttaatgggacccaaacatgtcagttctgtgagggtgaagatgatgaccacactgagaactggccttcgattcaaggatgattttcctgaattgtgttgcagagcttgggactgctttgttcgctgcctggatcatgcttgtctgggctcccttctcagtcatgtaatagtagctttgttacctcttatacacatccagcctaaagaaactgcagctatcttccactacctcataattgaaaacagggatgctgtgcaagattttcttcatgaaatatattttttacctgatcatccagaattaaaaaagataaaagccgttctccaggaatacagaaaggagacctctgagagcactgatcttcagacaactcttcagctctctatgaaggccattcaacatgaaaatgtcgatgttcgtattcatgctcttacaagcttgaaggaaaccttgtataaaaatcaggaaaaactgataaagtatgcaacagacagtgaaacagtagaacctattatctcacagttggtgacagtgcttttgaaaggttgccaagatgcaaactctcaagctcggttgctctgtggggaatgtttaggggaattgggggcgatagatccaggtcgattagatttctcaacaactgaaactcaaggaaaagattttacatttgtgactggagtagaagattcaagctttgcctatggattattgatggagctaacaagagcttaccttgcgtatgctgataatagccgagctcaagattcagctgcctatgccattcaggagttgctttctatttatgactgtagagagatggagaccaacggcccaggtcaccaattgtggaggagatttcctgagcatgttcgggaaatactagaacctcatctaaataccagatacaagagttctcagaagtcaaccgattggtctggagtaaagaagccaatttacttaagtaaattgggtagtaactttgcagaatggtcagcatcttgggcaggttatcttattacaaaggttcgacatgatcttgccagtaaaattttcacctgctgtagcattatgatgaagcatgatttcaaagtgaccatctatcttcttccacatattctggtgtatgtcttactgggttgtaatcaagaagatcagcaggaggtttatgcagaaattatggcagttctaaagcatgacgatcagcataccataaatacccaagacattgcatctgatctgtgtcaactcagtacacagactgtgttctccatgcttgaccatctcacacagtgggcaaggcacaaatttcaggcactgaaagctgagaaatgtccacacagcaaatcaaacagaaataaggtagactcaatggtatctactgtggattatgaagactatcagagtgtaacccgttttctagacctcataccccaggatactctggcagtagcttcctttcgctccaaagcatacacacgagctgtaatgcactttgaatcatttattacagaaaagaagcaaaatattcaggaacatcttggatttttacagaaattgtatgctgctatgcatgaacctgatggagtggccggagtcagtgcaattagaaaggcagaaccatctctaaaagaacagatccttgaacatgaaagccttggcttgctgagggatgccactgcttgttatgacagggctattcagctagaaccagaccagatcattcattatcatggtgtagtaaagtccatgttaggtcttggtcagctgtctactgttatcactcaggtgaatggagtgcatgctaacaggtccgagtggacagatgaattaaacacgtacagagtggaagcagcttggaaattgtcacagtgggatttggtggaaaactatttggcagcagatggaaaatctacaacatggagtgtcagactgggacagctattattatcagccaaaaaaagagatatcacagctttttatgactcactgaaactagtgagagcagaacaaattgtacctctttcagctgcaagctttgaaagaggctcctaccaacgaggatatgaatatattgtgagattgcacatgttatgtgagttggagcatagcatcaaaccacttttccagcattctccaggtgacagttctcaagaagattctctaaactgggtagctcgactagaaatgacccagaattcctacagagccaaggagcctatcctggctctccggagggctttactaagcctcaacaaaagaccagattacaatgaaatggttggagaatgctggctgcagagtgccagggtagctagaaaggctggtcaccaccagacagcctacaatgctctccttaatgcaggggaatcacgactcgctgaactgtacgtggaaagggcaaagtggctctggtccaagggtgatgttcaccaggcactaattgttcttcaaaaaggtgttgaattatgttttcctgaaaatgaaaccccacctgagggtaagaacatgttaatccatggtcgagctatgctactagtgggccgatttatggaagaaacagctaactttgaaagcaatgcaattatgaaaaaatataaggatgtgaccgcgtgcctgccagaatgggaggatgggcatttttaccttgccaagtactatgacaaattgatgcccatggtcacagacaacaaaatggaaaagcaaggtgatctcatccggtatatagttcttcattttggcagatctctacaatatggaaatcagttcatatatcagtcaatgccacgaatgttaactctatggcttgattatggtacaaaggcatatgaatgggaaaaagctggccgctccgatcgtgtacaaatgaggaatgatttgggtaaaataaacaaggttatcacagagcatacaaactatttagctccatatcaatttttgactgctttttcacaattgatctctcgaatttgtcattctcacgatgaagtttttgttgtcttgatggaaataatagccaaagtatttctagcctatcctcaacaagcaatgtggatgatgacagctgtgtcaaagtcatcttatcccatgcgtgtgaacagatgcaaggaaatcctcaataaagctattcatatgaaaaaatccttagagaagtttgttggagatgcaactcgcctaacagataagcttctagaattgtgcaataaaccggttgatggaagtagttccacattaagcatgagcactcattttaaaatgcttaaaaagctggtagaagaagcaacatttagtgaaatcctcattcctctacaatcagtcatgatacctacacttccatcaattctgggtacccatgctaaccatgctagccatgaaccatttcctggacattgggcctatattgcagggtttgatgatatggtggaaattcttgcttctcttcagaaaccaaagaagatttctttaaaaggctcagatggaaagttctacatcatgatgtgtaagccaaaagatgacctgagaaaggattgtagactaatggaattcaattccttgattaataagtgcttaagaaaagatgcagagtctcgtagaagagaacttcatattcgaacatatgcagttattccactaaatgatgaatgtgggattattgaatgggtgaacaacactgctggtttgagacctattctgaccaaactatataaagaaaagggagtgtatatgacaggaaaagaacttcgccagtgtatgctaccaaagtcagcagctttatctgaaaaactcaaagtattccgagaatttctcctgcccaggcatcctcctatttttcatgagtggtttctgagaacattccctgatcctacatcatggtacagtagtagatcagcttactgccgttccactgcagtaatgtcaatggttggttatattctggggcttggagaccgtcatggtgaaaatattctctttgattctttgactggtgaatgcgtacatgtagatttcaattgtcttttcaataagggagaaacctttgaagttccagaaattgtgccatttcgcctgactcataatatggttaatggaatgggtcctatgggaacagagggtctttttcgaagagcatgtgaagttacaatgaggctgatgcgtgatcagcgagagcctttaatgagtgtcttaaagacttttctacatgatcctcttgtggaatggagtaaaccagtgaaagggcattccaaagcgccactgaatgaaactggagaagttgtcaatgaaaaggccaagacccatgttcttgacattgagcagcgactacaaggtgtaatcaagactcgaaatagagtgacaggactgccgttatctattgaaggacatgtgcattaccttatacaggaagctactgatgaaaacttactatgccagatgtatcttggttggactccatatatgtgaaatgaaattatgtaaaagaatatgttaataatctaaaagtaatgcatttggtatgaatctgtggttgtatctgttcaattctaaagtacaacataaatttacgttctcagcaactgttatttctctctgatcattaattatatgtaaaataatatacattcagttattaagaaataaactgctttctt

SEQ ID NO: 5 - DNA, 3603 bp, Homo sapiens
agtcaaggctttgacagggcatagtctcctccaataatcttctccgttctctctcattattccctcgagttcttctcagtcaagctgcatgtatgtatgtgtgtcccgagaagcggtttgatactgagctgcatttgcctttactgtggagttttgttgccggttctgctccctaatcttccttttctgacgtgcctgagcatgtccacattagaatctgtgacatacctacctgaaaaaggtttatattgtcagagactgccaagcagccggacacacgggggcacagaatcactgaaggggaaaaatacagaaaatatgggtttctacggcacattaaaaatgattttttacaaaatgaaaagaaagttggaccatggttctgaggtccgctctttttctttgggaaagaaaccatgcaaagtctcagaatatacaagtaccactgggcttgtaccatgttcagcaacaccaacaacttttggggacctcagagcagccaatggccaagggcaacaacgacgccgaattacatctgtccagccacctacaggcctccaggaatggctaaaaatgtttcagagctggagtggaccagagaaattgcttgctttagatgaactcattgatagttgtgaaccaacacaagtaaaacatatgatgcaagtgatagaaccccagtttcaacgagacttcatttcattgctccctaaagagttggcactctatgtgctttcattcctggaacccaaagacctgctacaagcagctcagacatgtcgctactggagaattttggctgaagacaaccttctctggagagagaaatgcaaagaagaggggattgatgaaccattgcacatcaagagaagaaaagtaataaaaccaggtttcatacacagtccatggaaaagtgcatacatcagacagcacagaattgatactaactggaggcgaggagaactcaaatctcctaaggtgctgaaaggacatgatgatcatgtgatcacatgcttacagttttgtggtaaccgaatagttagtggttctgatgacaacactttaaaagtttggtcagcagtcacaggcaaatgtctgagaacattagtgggacatacaggtggagtatggtcatcacaaatgagagacaacatcatcattagtggatctacagatcggacactcaaagtgtggaatgcagagactggagaatgtatacacaccttatatgggcatacttccactgtgcgttgtatgcatcttcatgaaaaaagagttgttagcggttctcgagatgccactcttagggtttgggatattgagacaggccagtgtttacatgttttgatgggtcatgttgcagcagtccgctgtgttcaatatgatggcaggagggttgttagtggagcatatgattttatggtaaaggtgtgggatccagagactgaaacctgtctacacacgttgcaggggcatactaatagagtctattcattacagtttgatggtatccatgtggtgagtggatctcttgatacatcaatccgtgtttgggatgtggagacagggaattgcattcacacgttaacagggcaccagtcgttaacaagtggaatggaactcaaagacaatattcttgtctctgggaatgcagattctacagttaaaatctgggatatcaaaacaggacagtgtttacaaacattgcaaggtcccaacaagcatcagagtgctgtgacctgtttacagttcaacaagaactttgtaattaccagctcagatgatggaactgtaaaactatgggacttgaaaacgggtgaatttattcgaaacctagtcacattggagagtggggggagtgggggagttgtgtggcggatcagagcctcaaacacaaagctggtgtgtgcagttgggagtcggaatgggactgaagaaaccaagctgctggtgctggactttgatgtggacatgaagtgaagagcagaaaagatgaatttgtccaattgtgtagacgatatactccctgcccttccccctgcaaaaagaaaaaaagaaaagaaaaagaaaaaaatcccttgttctcagtggtgcaggatgttggcttggggcaacagattgaaaagacctacagactaagaaggaaaagaagaagagatgacaaaccataactgacaagagaggcgtctgctgtctcatcacataaaaggcttcacttttgactgagggcagctttgcaaaatgagactttctaaatcaaaccaggtgcaattatttctttattttcttctccagtggtcattgggcagtgttaatgctgaaacatcattacagattctgctagcctgttcttttaccactgacagctagacacctagaaaggaactgcaataatatcaaaacaagtactggttgactttctaattagagagcatctgcaacaaaaagtcatttttctggagtggaaaagcttaaaaaaattactgtgaattgtttttgtacagttatcatgaaaagcttttttttttttttttttgccaaccattgccaatgtcaatcaatcacagtattagcctctgttaatctatttactgttgcttccatatacattcttcaatgcatatgttgctcaaaggtggcaagttgtcctgggttctgtgagtcctgagatggatttaattcttgatgctggtgctagaagtaggtcttcaaatatgggattgttgtcccaaccctgtactgtactcccagtggccaaacttatttatgctgctaaatgaaagaaagaaaaaagcaaattatttttttttattttttttctgctgtgacgttttagtcccagactgaattccaaatttgctctagtttggttatggaaaaaagactttttgccactgaaacttgagccatctgtgcctctaagaggctgagaatggaagagtttcagataataaagagtgaagtttgcctgcaagtaaagaattgagagtgtgtgcaaagcttattttcttttatctgggcaaaaattaaaacacattccttggaacagagctattacttgcctgttctgtggagaaacttttctttttgagggctgtggtgaatggatgaacgtacatcgtaaaactgacaaaatattttaaaaatatataaaacacaaaattaaaataaagttgctggtcagtcttagtgttttacagtatttgggaaaacaactgttacagttttattgctctgagtaactgacaaagcagaaactattcagtttttgtagtaaaggcgtcacatgcaaacaaacaaaatgaatgaaacagtcaaatggtttgcctcattctccaagagccacaactcaagctgaactgtgaaagtggtttaacactgtatcctaggcgatcttttttcctccttctgtttatttttttgtttgttttatttatagtctgatttaaaacaatcagattcaagttggttaattttagttatgtaacaacctgacatgatggaggaaaacaacctttaaagggattgtgtctatggtttgattcacttagaaattttattttcttataacttaagtgcaataaaatgtgttttttcatgtta

SEQ ID NO: 6 - DNA, 5783 bp, Homo sapiens
gcggacactcctctcggctcctccccggcagcggcggcggctcggagcgggctccggggctcgggtgcagcggccagcgggcgcctggcggcgaggattacccggggaagtggttgtctcctggctggagccgcgagacgggcgctcagggcgcggggccggcggcggcgaacgagaggacggactctggcggccgggtcgttggccgcggggagcgcgggcaccgggcgagcaggccgcgtcgcgctcaccatggtcagctactgggacaccggggtcctgctgtgcgcgctgctcagctgtctgcttctcacaggatctagttcaggttcaaaattaaaagatcctgaactgagtttaaaaggcacccagcacatcatgcaagcaggccagacactgcatctccaatgcaggggggaagcagcccataaatggtctttgcctgaaatggtgagtaaggaaagcgaaaggctgagcataactaaatctgcctgtggaagaaatggcaaacaattctgcagtactttaaccttgaacacagctcaagcaaaccacactggcttctacagctgcaaatatctagctgtacctacttcaaagaagaaggaaacagaatctgcaatctatatatttattagtgatacaggtagacctttcgtagagatgtacagtgaaatccccgaaattatacacatgactgaaggaagggagctcgtcattccctgccgggttacgtcacctaacatcactgttactttaaaaaagtttccacttgacactttgatccctgatggaaaacgcataatctgggacagtagaaagggcttcatcatatcaaatgcaacgtacaaagaaatagggcttctgacctgtgaagcaacagtcaatgggcatttgtataagacaaactatctcacacatcgacaaaccaatacaatcatagatgtccaaataagcacaccacgcccagtcaaattacttagaggccatactcttgtcctcaattgtactgctaccactcccttgaacacgagagttcaaatgacctggagttaccctgatgaaaaaaataagagagcttccgtaaggcgacgaattgaccaaagcaattcccatgccaacatattctacagtgttcttactattgacaaaatgcagaacaaagacaaaggactttatacttgtcgtgtaaggagtggaccatcattcaaatctgttaacacctcagtgcatatatatgataaagcattcatcactgtgaaacatcgaaaacagcaggtgcttgaaaccgtagctggcaagcggtcttaccggctctctatgaaagtgaaggcatttccctcgccggaagttgtatggttaaaagatgggttacctgcgactgagaaatctgctcgctatttgactcgtggctactcgttaattatcaaggacgtaactgaagaggatgcagggaattatacaatcttgctgagcataaaacagtcaaatgtgtttaaaaacctcactgccactctaattgtcaatgtgaaaccccagatttacgaaaaggccgtgtcatcgtttccagacccggctctctacccactgggcagcagacaaatcctgacttgtaccgcatatggtatccctcaacctacaatcaagtggttctggcacccctgtaaccataatcattccgaagcaaggtgtgacttttgttccaataatgaagagtcctttatcctggatgctgacagcaacatgggaaacagaattgagagcatcactcagcgcatggcaataatagaaggaaagaataagatggctagcaccttggttgtggctgactctagaatttctggaatctacatttgcatagcttccaataaagttgggactgtgggaagaaacataagcttttatatcacagatgtgccaaatgggtttcatgttaacttggaaaaaatgccgacggaaggagaggacctgaaactgtcttgcacagttaacaagttcttatacagagacgttacttggattttactgcggacagttaataacagaacaatgcactacagtattagcaagcaaaaaatggccatcactaaggagcactccatcactcttaatcttaccatcatgaatgtttccctgcaagattcaggcacctatgcctgcagagccaggaatgtatacacaggggaagaaatcctccagaagaaagaaattacaatcagagatcaggaagcaccatacctcctgcgaaacctcagtgatcacacagtggccatcagcagttccaccactttagactgtcatgctaatggtgtccccgagcctcagatcacttggtttaaaaacaaccacaaaatacaacaagagcctggaattattttaggaccaggaagcagcacgctgtttattgaaagagtcacagaagaggatgaaggtgtctatcactgcaaagccaccaaccagaagggctctgtggaaagttcagcatacctcactgttcaaggaacctcggacaagtctaatctggagctgatcactctaacatgcacctgtgtggctgcgactctcttctggctcctattaaccctctttatccgaaaaatgaaaaggtcttcttctgaaataaagactgactacctatcaattataatggacccagatgaagttcctttggatgagcagtgtgagcggctcccttatgatgccagcaagtgggagtttgcccgggagagacttaaactgggcaaatcacttggaagaggggcttttggaaaagtggttcaagcatcagcatttggcattaagaaatcacctacgtgccggactgtggctgtgaaaatgctgaaagagggggccacggccagcgagtacaaagctctgatgactgagctaaaaatcttgacccacattggccaccatctgaacgtggttaacctgctgggagcctgcaccaagcaaggagggcctctgatggtgattgttgaatactgcaaatatggaaatctctccaactacctcaagagcaaacgtgacttattttttctcaacaaggatgcagcactacacatggagcctaagaaagaaaaaatggagccaggcctggaacaaggcaagaaaccaagactagatagcgtcaccagcagcgaaagctttgcgagctccggctttcaggaagataaaagtctgagtgatgttgaggaagaggaggattctgacggtttctacaaggagcccatcactatggaagatctgatttcttacagttttcaagtggccagaggcatggagttcctgtcttccagaaagtgcattcatcgggacctggcagcgagaaacattcttttatctgagaacaacgtggtgaagatttgtgattttggccttgcccgggatatttataagaaccccgattatgtgagaaaaggagatactcgacttcctctgaaatggatggctcctgaatctatctttgacaaaatctacagcaccaagagcgacgtgtggtcttacggagtattgctgtgggaaatcttctccttaggtgggtctccatacccaggagtacaaatggatgaggacttttgcagtcgcctgagggaaggcatgaggatgagagctcctgagtactctactcctgaaatctatcagatcatgctggactgctggcacagagacccaaaagaaaggccaagatttgcagaacttgtggaaaaactaggtgatttgcttcaagcaaatgtacaacaggatggtaaagactacatcccaatcaatgccatactgacaggaaatagtgggtttacatactcaactcctgccttctctgaggacttcttcaaggaaagtatttcagctccgaagtttaattcaggaagctctgatgatgtcagatacgtaaatgctttcaagttcatgagcctggaaagaatcaaaacctttgaagaacttttaccgaatgccacctccatgtttgatgactaccagggcgacagcagcactctgttggcctctcccatgctgaagcgcttcacctggactgacagcaaacccaaggcctcgctcaagattgacttgagagtaaccagtaaaagtaaggagtcggggctgtctgatgtcagcaggcccagtttctgccattccagctgtgggcacgtcagcgaaggcaagcgcaggttcacctacgaccacgctgagctggaaaggaaaatcgcgtgctgctccccgcccccagactacaactcggtggtcctgtactccaccccacccatctagagtttgacacgaagccttatttctagaagcacatgtgtatttatacccccaggaaactagcttttgccagtattatgcatatataagtttacacctttatctttccatgggagccagctgctttttgtgatttttttaatagtgcttttttttttttgactaacaagaatgtaactccagatagagaaatagtgacaagtgaagaacactactgctaaatcctcatgttactcagtgttagagaaatccttcctaaacccaatgacttccctgctccaacccccgccacctcagggcacgcaggaccagtttgattgaggagctgcactgatcacccaatgcatcacgtaccccactgggccagccctgcagcccaaaacccagggcaacaagcccgttagccccagggatcactggctggcctgagcaacatctcgggagtcctctagcaggcctaagacatgtgaggaggaaaaggaaaaaaagcaaaaagcaagggagaaaagagaaaccgggagaaggcatgagaaagaatttgagacgcaccatgtgggcacggagggggacggggctcagcaatgccatttcagtggcttcccagctctgacccttctacatttgagggcccagccaggagcagatggacagcgatgaggggacattttctggattctgggaggcaagaaaaggacaaatatcttttttggaactaaagcaaattttagaactttacctatggaagtggttctatgtccattctcattcgtggcatgttttgatttgtagcactgagggtggcactcaactctgagcccatacttttggctcctctagtaagatgcactgaaaacttagccagagttaggttgtctccaggccatgatggccttacactgaaaatgtcacattctattttgggtattaatatatagtccagacacttaactcaatttcttggtattattctgttttgcacagttagttgtgaaagaaagctgagaagaatgaaaatgcagtcctgaggagaggagttttctccatatcaaaacgagggctgatggaggaaaaaggtcaataaggtcaagggaaaaccccgtctctataccaaccaaaccaattcaccaacacagttgggacccaaaacacaggaagtcagtcacgtttccttttcatttaatggggattccactatctcacactaatctgaaaggatgtggaagagcattagctggcgcatattaagcactttaagctccttgagtaaaaaggtggtatgtaatttatgcaaggtatttctccagttgggactcaggatattagttaatgagccatcactagaagaaaagcccattttcaactgctttgaaacttgcctggggtctgagcatgatgggaatagggagacagggtaggaaagggcgcctactcttcagggtctaaagatcaagtgggccttggatcgctaagctggctctgtttgatgctatttatgcaagttagggtctatgtattta

SEQ ID NO: 7 - DNA, 3496 bp, Homo sapiens
acctgcagcgcgaggcgcgccgctccaggcggcatcgcagggctgggccggcgcggcctggggaccccgggctccggaggccatgccggcgttggcgcgcgacggcggccagctgccgctgctcgttgttttttctgcaatgatatttgggactattacaaatcaagatctgcctgtgatcaagtgtgttttaatcaatcataagaacaatgattcatcagtggggaagtcatcatcatatcccatggtatcagaatccccggaagacctcgggtgtgcgttgagaccccagagctcagggacagtgtacgaagctgccgctgtggaagtggatgtatctgcttccatcacactgcaagtgctggtcgacgccccagggaacatttcctgtctctgggtctttaagcacagctccctgaattgccagccacattttgatttacaaaacagaggagttgtttccatggtcattttgaaaatgacagaaacccaagctggagaatacctactttttattcagagtgaagctaccaattacacaatattgtttacagtgagtataagaaataccctgctttacacattaagaagaccttactttagaaaaatggaaaaccaggacgccctggtctgcatatctgagagcgttccagagccgatcgtggaatgggtgctttgcgattcacagggggaaagctgtaaagaagaaagtccagctgttgttaaaaaggaggaaaaagtgcttcatgaattatttgggacggacataaggtgctgtgccagaaatgaactgggcagggaatgcaccaggctgttcacaatagatctaaatcaaactcctcagaccacattgccacaattatttcttaaagtaggggaacccttatggataaggtgcaaagctgttcatgtgaaccatggattcgggctcacctgggaattagaaaacaaagcactcgaggagggcaactactttgagatgagtacctattcaacaaacagaactatgatacggattctgtttgcttttgtatcatcagtggcaagaaacgacaccggatactacacttgttcctcttcaaagcatcccagtcaatcagctttggttaccatcgtagaaaagggatttataaatgctaccaattcaagtgaagattatgaaattgaccaatatgaagagttttgtttttctgtcaggtttaaagcctacccacaaatcagatgtacgtggaccttctctcgaaaatcatttccttgtgagcaaaagggtcttgataacggatacagcatatccaagttttgcaatcataagcaccagccaggagaatatatattccatgcagaaaatgatgatgcccaatttaccaaaatgttcacgctgaatataagaaggaaacctcaagtgctcgcagaagcatcggcaagtcaggcgtcctgtttctcggatggatacccattaccatcttggacctggaagaagtgttcagacaagtctcccaactgcacagaagagatcacagaaggagtctggaatagaaaggctaacagaaaagtgtttggacagtgggtgtcgagcagtactctaaacatgagtgaagccataaaagggttcctggtcaagtgctgtgcatacaattcccttggcacatcttgtgagacgatccttttaaactctccaggccccttccctttcatccaagacaacatctcattctatgcaacaattggtgtttgtctcctcttcattgtcgttttaaccctgctaatttgtcacaagtacaaaaagcaatttaggtatgaaagccagctacagatggtacaggtgaccggctcctcagataatgagtacttctacgttgatttcagagaatatgaatatgatctcaaatgggagtttccaagagaaaatttagagtttgggaaggtactaggatcaggtgcttttggaaaagtgatgaacgcaacagcttatggaattagcaaaacaggagtctcaatccaggttgccgtcaaaatgctgaaagaaaaagcagacagctctgaaagagaggcactcatgtcagaactcaagatgatgacccagctgggaagccacgagaatattgtgaacctgctgggggcgtgcacactgtcaggaccaatttacttgatttttgaatactgttgctatggtgatcttctcaactatctaagaagtaaaagagaaaaatttcacaggacttggacagagattttcaaggaacacaatttcagtttttaccccactttccaatcacatccaaattccagcatgcctggttcaagagaagttcagatacacccggactcggatcaaatctcagggcttcatgggaattcatttcactctgaagatgaaattgaatatgaaaaccaaaaaaggctggaagaagaggaggacttgaatgtgcttacatttgaagatcttctttgctttgcatatcaagttgccaaaggaatggaatttctggaatttaagtcgtgtgttcacagagacctggccgccaggaacgtgcttgtcacccacgggaaagtggtgaagatatgtgactttggattggctcgagatatcatgagtgattccaactatgttgtcaggggcaatgcccgtctgcctgtaaaatggatggcccccgaaagcctgtttgaaggcatctacaccattaagagtgatgtctggtcatatggaatattactgtgggaaatcttctcacttggtgtgaatccttaccctggcattccggttgatgctaacttctacaaactgattcaaaatggatttaaaatggatcagccattttatgctacagaagaaatatacattataatgcaatcctgctgggcttttgactcaaggaaacggccatccttccctaatttgacttcgtttttaggatgtcagctggcagatgcagaagaagcgatgtatcagaatgtggatggccgtgtttcggaatgtcctcacacctaccaaaacaggcgacctttcagcagagagatggatttggggctactctctccgcaggctcaggtcgaagattcgtagaggaacaatttagttttaaggacttcatccctccacctatccctaacaggctgtagattaccaaaacaagattaatttcatcactaaaagaaaatctattatcaactgctgcttcaccagacttttctctagaagctgtctgcgtttactcttgttttcaaagggacttttgtaaaatcaaatcatcctgtcacaaggcaggaggagctgataatgaactttattggagcattgatctgcatccaaggccttctcaggctggcttgagtgaattgtgtacctgaagtacagtatattcttgtaaatacataaaacaaaagcattttgctaaggagaagctaatatgattttttaagtctatgttttaaaataatatgtaaatttttcagctatttagtgatatattttatgggtgggaataaaatttctact

SEQ ID NO: 8 - DNA, 8707 bp, Homo sapiens
gcggggaaggcgggcggtggggcagggggcctgaagcggcggtaccggtgctggcggcggcagctgaggccttggccgaagccgcgcgaacctcagggcaagatgcttggaaccggacctgccgccgccaccaccgctgccaccacatctagcaatgtgagcgtcctgcagcagtttgccagtggcctaaagagccggaatgaggaaaccagggccaaagccgccaaggagctccagcactatgtcaccatggaactccgagagatgagtcaagaggagtctactcgcttctatgaccaactgaaccatcacatttttgaattggtttccagctcagatgccaatgagaggaaaggtggcatcttggccatagctagcctcataggagtggaaggtgggaatgccacccgaattggcagatttgccaactatcttcggaacctcctcccctccaatgacccagttgtcatggaaatggcatccaaggccattggccgtcttgccatggcaggggacacttttaccgctgagtacgtggaatttgaggtgaagcgagccctggaatggctgggtgctgaccgcaatgagggccggagacatgcagctgtcctggttctccgtgagctggccatcagcgtccctaccttcttcttccagcaagtgcaacccttctttgacaacatttttgtggccgtgtgggaccccaaacaggccatccgtgagggagctgtagccgcccttcgtgcctgtctgattctcacaacccagcgtgagccgaaggagatgcagaagcctcagtggtacaggcacacatttgaagaagcagagaagggatttgatgagaccttggccaaagagaagggcatgaatcgggatgatcggatccatggagccttgttgatccttaacgagctggtccgaatcagcagcatggagggagagcgtctgagagaagaaatggaagaaatcacacagcagcagctggtacacgacaagtactgcaaagatctcatgggcttcggaacaaaacctcgtcacattacccccttcaccagtttccaggctgtacagccccagcagtcaaatgccttggtggggctgctggggtacagctctcaccaaggcctcatgggatttgggacctcccccagtccagctaagtccaccctggtggagagccggtgttgcagagacttgatggaggagaaatttgatcaggtgtgccagtgggtgctgaaatgcaggaatagcaagaactcgctgatccaaatgacaatccttaatttgttgccccgcttggctgcattccgaccttctgccttcacagatacccagtatctccaagataccatgaaccatgtcctaagctgtgtcaagaaggagaaggaacgtacagcggccttccaagccctggggctactttctgtggctgtgaggtctgagtttaaggtctatttgcctcgcgtgctggacatcatccgagcggccctgcccccaaaggacttcgcccataagaggcagaaggcaatgcaggtggatgccacagtcttcacttgcatcagcatgctggctcgagcaatggggccaggcatccagcaggatatcaaggagctgctggagcccatgctggcagtgggactaagccctgccctcactgcagtgctctacgacctgagccgtcagattccacagctaaagaaggacattcaagatgggctactgaaaatgctgtccctggtccttatgcacaaaccccttcgccacccaggcatgcccaagggcctggcccatcagctggcctctcctggcctcacgaccctccctgaggccagcgatgtgggcagcatcactcttgccctccgaacgcttggcagctttgaatttgaaggccactctctgacccaatttgttcgccactgtgcggatcatttcctgaacagtgagcacaaggagatccgcatggaggctgcccgcacctgctcccgcctgctcacaccctccatccacctcatcagtggccatgctcatgtggttagccagaccgcagtgcaagtggtggcagatgtgcttagcaaactgctcgtagttgggataacagatcctgaccctgacattcgctactgtgtcttggcgtccctggacgagcgctttgatgcacacctggcccaggcggagaacttgcaggccttgtttgtggctctgaatgaccaggtgtttgagatccgggagctggccatctgcactgtgggccgactcagtagcatgaaccctgcctttgtcatgcctttcctgcgcaagatgctcatccagattttgacagagttggagcacagtgggattggaagaatcaaagagcagagtgcccgcatgctggggcacctggtctccaatgccccccgactcatccgcccctacatggagcctattctgaaggcattaattttgaaactgaaagatccagaccctgatccaaacccaggtgtgatcaataatgtcctggcaacaataggagaattggcacaggttagtggcctggaaatgaggaaatgggttgatgaactttttattatcatcatggacatgctccaggattcctctttgttggccaaaaggcaggtggctctgtggaccctgggacagttggtggccagcactggctatgtagtagagccctacaggaagtaccctactttgcttgaggtgctactgaattttctgaagactgagcagaaccagggtacacgcagagaggccatccgtgtgttagggcttttaggggctttggatccttacaagcacaaagtgaacattggcatgatagaccagtcccgggatgcctctgctgtcagcctgtcagaatccaagtcaagtcaggattcctctgactatagcactagtgaaatgctggtcaacatgggaaacttgcctctggatgagttctacccagctgtgtccatggtggccctgatgcggatcttccgagaccagtcactctctcatcatcacaccatggttgtccaggccatcaccttcatcttcaagtccctgggactcaaatgtgtgcagttcctgccccaggtcatgcccacgttccttaacgtcattcgagtctgtgatggggccatccgggaatttttgttccagcagctgggaatgttggtgtcctttgtgaagagccacatcagaccttatatggatgaaatagtcaccctcatgagagaattctgggtcatgaacacctcaattcagagcacgatcattcttctcattgagcaaattgtggtagctcttgggggtgaatttaagctctacctgccccagctgatcccacacatgctgcgtgtcttcatgcatgacaacagcccaggccgcattgtctctatcaagttactggctgcaatccagctgtttggcgccaacctggatgactacctgcatttactgctgcctcctattgttaagttgtttgatgcccctgaagctccactgccatctcgaaaggcagcgctagagactgtggaccgcctgacggagtccctggatttcactgactatgcctcccggatcattcaccctattgttcgaacactggaccagagcccagaactgcgctccacagccatggacacgctgtcttcacttgtttttcagctggggaagaagtaccaaattttcattccaatggtgaataaagttctggtgcgacaccgaatcaatcatcagcgctatgatgtgctcatctgcagaattgtcaagggatacacacttgctgatgaagaggaggatcctttgatttaccagcatcggatgcttaggagtggccaaggggatgcattggctagtggaccagtggaaacaggacccatgaagaaactgcacgtcagcaccatcaacctccaaaaggcaaccgcctggggcgctgccaggagggtctccaaagatgactggctggaatggctgagacggctgagcctggagctgctgaaggactcatcatcgccctccctgcgctcctgctgggccctggcacaggcctacaacccgatggccagggatctcttcaatgctgcatttgtgtcctgctggtctgaactgaatgaagatcaacaggatgagctcatcagaagcatcgagttggccctcacctcacaagacatcgctgaagtcacacagaccctcttaaacttggctgaattcatggaacacagtgacaagggccccctgccactgagagatgacaatggcattgttctgctgggtgagagagctgccaagtgccgagcatatgccaaagcactacactacaaagaactggagttccagaaaggccccacccctgccattctagaatctctcatcagcattaataataagctacagcagccggaggcagcggccggagtgttagaatatgccatgaaacactttggagagctggagatccaggctacctggtatgagaaactgcacgagtgggaggatgcccttgtggcctatgacaagaaaatggacaccaacaaggacgacccagagctgatgctgggccgcatgcgctgcctcgaggccttgggggaatggggtcaactccaccagcagtgctgtgaaaagtggaccctggttaatgatgagacccaagccaagatggcccggatggctgctgcagctgcatggggtttaggtcagtgggacagcatggaagaatacacctgtatgatccctcgggacacccatgatggggcattttatagagctgtgctggcactgcatcaggacctcttctccttggcacaacagtgcattgacaaggccagggacctgctggatgctgaattaactgcgatggcaggagagagttacagtcgggcatatggggccatggtttcttgccacatgctgtccgagctggaggaggttatccagtacaaacttgtccccgagcgacgagagatcatccgccagatctggtgggagagactgcagggctgccagcgtatcgtagaggactggcagaaaatccttatggtgcggtcccttgtggtcagccctcatgaagacatgagaacctggctcaagtatgcaagcctgtgcggcaagagtggcaggctggctcttgctcataaaactttagtgttgctcctgggagttgatccgtctcggcaacttgaccatcctctgccaacagttcaccctcaggtgacctatgcctacatgaaaaacatgtggaagagtgcccgcaagatcgatgccttccagcacatgcagcattttgtccagaccatgcagcaacaggcccagcatgccatcgctactgaggaccagcagcataagcaggaactgcacaagctcatggcccgatgcttcctgaaacttggagagtggcagctgaatctacagggcatcaatgagagcacaatccccaaagtgctgcagtactacagcgccgccacagagcacgaccgcagctggtacaaggcctggcatgcgtgggcagtgatgaacttcgaagctgtgctacactacaaacatcagaaccaagcccgcgatgagaagaagaaactgcgtcatgccagcggggccaacatcaccaacgccaccactgccgccaccacggccgccactgccaccaccactgccagcaccgagggcagcaacagtgagagcgaggccgagagcaccgagaacagccccaccccatcgccgctgcagaagaaggtcactgaggatctgtccaaaaccctcctgatgtacacggtgcctgccgtccagggcttcttccgttccatctccttgtcacgaggcaacaacctccaggatacactcagagttctcaccttatggtttgattatggtcactggccagatgtcaatgaggccttagtggagggggtgaaagccatccagattgatacctggctacaggttatacctcagctcattgcaagaattgatacgcccagacccttggtgggacgtctcattcaccagcttctcacagacattggtcggtaccacccccaggccctcatctacccactgacagtggcttctaagtctaccacgacagcccggcacaatgcagccaacaagattctgaagaacatgtgtgagcacagcaacaccctggtccagcaggccatgatggtgagcgaggagctgatccgagtggccatcctctggcatgagatgtggcatgaaggcctggaagaggcatctcgtttgtactttggggaaaggaacgtgaaaggcatgtttgaggtgctggagcccttgcatgctatgatggaacggggcccccagactctgaaggaaacatcctttaatcaggcctatggtcgagatttaatggaggcccaagagtggtgcaggaagtacatgaaatcagggaatgtcaaggacctcacccaagcctgggacctctattatcatgtgttccgacgaatctcaaagcagctgcctcagctcacatccttagagctgcaatatgtttccccaaaacttctgatgtgccgggaccttgaattggctgtgccaggaacatatgaccccaaccagccaatcattcgcattcagtccatagcaccgtctttgcaagtcatcacatccaagcagaggccccggaaattgacacttatgggcagcaacggacatgagtttgttttccttctaaaaggccatgaagatctgcgccaggatgagcgtgtgatgcagctcttcggcctggttaacacccttctggccaatgacccaacatctcttcggaaaaacctcagcatccagagatacgctgtcatccctttatcgaccaactcgggcctcattggctgggttccccactgtgacacactgcacgccctcatccgggactacagggagaagaagaagatccttctcaacatcgagcatcgcatcatgttgcggatggctccggactatgaccacttgactctgatgcagaaggtggaggtgtttgagcatgccgtcaataatacagctggggacgacctggccaagctgctgtggctgaaaagccccagctccgaggtgtggtttgaccgaagaaccaattatacccgttctttagcggtcatgtcaatggttgggtatattttaggcctgggagatagacacccatccaacctgatgctggaccgtctgagtgggaagatcctgcacattgactttggggactgctttgaggttgctatgacccgagagaagtttccagagaagattccatttagactaacaagaatgttgaccaatgctatggaggttacaggcctggatggcaactacagaatcacatgccacacagtgatggaggtgctgcgagagcacaaggacagtgtcatggccgtgctggaagcctttgtctatgaccccttgctgaactggaggctgatggacacaaataccaaaggcaacaagcgatcccgaacgaggacggattcctactctgctggccagtcagtcgaaattttggacggtgtggaacttggagagccagcccataagaaaacggggaccacagtgccagaatctattcattctttcattggagacggtttggtgaaaccagaggccctaaataagaaagctatccagattattaacagggttcgagataagctcactggtcgggacttctctcatgatgacactttggatgttccaacgcaagttgagctgctcatcaaacaagcgacatcccatgaaaacctctgccagtgctatattggctggtgccctttctggtaactggaggcccagatgtgcccatcacgttttttctgaggcttttgtactttagtaaatgcttccactaaactgaaaccatggtgagaaagtttgactttgttaaatattttgaaatgtaaatgaaaagaactactgtatattaaaagttggtttgaaccaactttctagctgctgttgaagaatatattgtcagaaacacaaggcttgatttggttcccaggacagtgaaacatagtaataccacgtaaatcaagccattcattttggggaacagaagatccataactttagaaatacgggttttgacttaactcacaagagaactcatcataagtacttgctgatggaagaatgacctagttgctcctctcaacatgggtacagcaaactcagcacagccaagaagcctcaggtcgtggagaacatggattaggatcctagactgtaaagacacagaagatgctgacctcacccctgccacctatcccaagacctcactggtctgtggacagcagcagaaatgtttgcaagataggccaaaatgagtacaaaaggtctgtcttccatcagacccagtgatgctgcgactcacacgcttcaattcaagacctgaccgctagtagggaggtttattcagatcgctggcagcctcggctgagcagatgcacagaggggatcactgtgcagtgggaccaccctcactggccttctgcagcagggttctgggatgttttcagtggtcaaaatactctgtttagagcaagggctcagaaaacagaaatactgtcatggaggtgctgaacacagggaaggtctggtacatattggaaattatgagcagaacaaatactcaactaaatgcacaaagtataaagtgtagccatgtctagacaccatgttgtatcagaataatttttgtgccaataaatgacatcagaattttaaacat

SEQ ID NO: 9 - DNA, 5822 bp, Homo sapiens
actgagtcccgggaccccgggagagcggtcaatgtgtggtcgctgcgtttcctctgcctgcgccgggcatcacttgcgcgccgcagaaagtccgtctggcagcctggatatcctctcctaccggcacccgcagacgcccctgcagccgcggtcggcgcccgggctccctagccctgtgcgctcaactgtcctgcgctgcggggtgccgcgagttccacctccgcgcctccttctctagacaggcgctgggagaaagaaccggctcccgagttctgggcatttcgcccggctcgaggtgcaggatgcagagcaaggtgctgctggccgtcgccctgtggctctgcgtggagacccgggccgcctctgtgggtttgcctagtgtttctcttgatctgcccaggctcagcatacaaaaagacatacttacaattaaggctaatacaactcttcaaattacttgcaggggacagagggacttggactggctttggcccaataatcagagtggcagtgagcaaagggtggaggtgactgagtgcagcgatggcctcttctgtaagacactcacaattccaaaagtgatcggaaatgacactggagcctacaagtgcttctaccgggaaactgacttggcctcggtcatttatgtctatgttcaagattacagatctccatttattgcttctgttagtgaccaacatggagtcgtgtacattactgagaacaaaaacaaaactgtggtgattccatgtctcgggtccatttcaaatctcaacgtgtcactttgtgcaagatacccagaaaagagatttgttcctgatggtaacagaatttcctgggacagcaagaagggctttactattcccagctacatgatcagctatgctggcatggtcttctgtgaagcaaaaattaatgatgaaagttaccagtctattatgtacatagttgtcgttgtagggtataggatttatgatgtggttctgagtccgtctcatggaattgaactatctgttggagaaaagcttgtcttaaattgtacagcaagaactgaactaaatgtggggattgacttcaactgggaatacccttcttcgaagcatcagcataagaaacttgtaaaccgagacctaaaaacccagtctgggagtgagatgaagaaatttttgagcaccttaactatagatggtgtaacccggagtgaccaaggattgtacacctgtgcagcatccagtgggctgatgaccaagaagaacagcacatttgtcagggtccatgaaaaaccttttgttgcttttggaagtggcatggaatctctggtggaagccacggtgggggagcgtgtcagaatccctgcgaagtaccttggttacccacccccagaaataaaatggtataaaaatggaataccccttgagtccaatcacacaattaaagcggggcatgtactgacgattatggaagtgagtgaaagagacacaggaaattacactgtcatccttaccaatcccatttcaaaggagaagcagagccatgtggtctctctggttgtgtatgtcccaccccagattggtgagaaatctctaatctctcctgtggattcctaccagtacggcaccactcaaacgctgacatgtacggtctatgccattcctcccccgcatcacatccactggtattggcagttggaggaagagtgcgccaacgagcccagccaagctgtctcagtgacaaacccatacccttgtgaagaatggagaagtgtggaggacttccagggaggaaataaaattgaagttaataaaaatcaatttgctctaattgaaggaaaaaacaaaactgtaagtacccttgttatccaagcggcaaatgtgtcagctttgtacaaatgtgaagcggtcaacaaagtcgggagaggagagagggtgatctccttccacgtgaccaggggtcctgaaattactttgcaacctgacatgcagcccactgagcaggagagcgtgtctttgtggtgcactgcagacagatctacgtttgagaacctcacatggtacaagcttggcccacagcctctgccaatccatgtgggagagttgcccacacctgtttgcaagaacttggatactctttggaaattgaatgccaccatgttctctaatagcacaaatgacattttgatcatggagcttaagaatgcatccttgcaggaccaaggagactatgtctgccttgctcaagacaggaagaccaagaaaagacattgcgtggtcaggcagctcacagtcctagagcgtgtggcacccacgatcacaggaaacctggagaatcagacgacaagtattggggaaagcatcgaagtctcatgcacggcatctgggaatccccctccacagatcatgtggtttaaagataatgagacccttgtagaagactcaggcattgtattgaaggatgggaaccggaacctcactatccgcagagtgaggaaggaggacgaaggcctctacacctgccaggcatgcagtgttcttggctgtgcaaaagtggaggcatttttcataatagaaggtgcccaggaaaagacgaacttggaaatcattattctagtaggcacggcggtgattgccatgttcttctggctacttcttgtcatcatcctacggaccgttaagcgggccaatggaggggaactgaagacaggctacttgtccatcgtcatggatccagatgaactcccattggatgaacattgtgaacgactgccttatgatgccagcaaatgggaattccccagagaccggctgaagctaggtaagcctcttggccgtggtgcctttggccaagtgattgaagcagatgcctttggaattgacaagacagcaacttgcaggacagtagcagtcaaaatgttgaaagaaggagcaacacacagtgagcatcgagctctcatgtctgaactcaagatcctcattcatattggtcaccatctcaatgtggtcaaccttctaggtgcctgtaccaagccaggagggccactcatggtgattgtggaattctgcaaatttggaaacctgtccacttacctgaggagcaagagaaatgaatttgtcccctacaagaccaaaggggcacgattccgtcaagggaaagactacgttggagcaatccctgtggatctgaaacggcgcttggacagcatcaccagtagccagagctcagccagctctggatttgtggaggagaagtccctcagtgatgtagaagaagaggaagctcctgaagatctgtataaggacttcctgaccttggagcatctcatctgttacagcttccaagtggctaagggcatggagttcttggcatcgcgaaagtgtatccacagggacctggcggcacgaaatatcctcttatcggagaagaacgtggttaaaatctgtgactttggcttggcccgggatatttataaagatccagattatgtcagaaaaggagatgctcgcctccctttgaaatggatggccccagaaacaatttttgacagagtgtacacaatccagagtgacgtctggtcttttggtgttttgctgtgggaaatattttccttaggtgcttctccatatcctggggtaaagattgatgaagaattttgtaggcgattgaaagaaggaactagaatgagggcccctgattatactacaccagaaatgtaccagaccatgctggactgctggcacggggagcccagtcagagacccacgttttcagagttggtggaacatttgggaaatctcttgcaagctaatgctcagcaggatggcaaagactacattgttcttccgatatcagagactttgagcatggaagaggattctggactctctctgcctacctcacctgtttcctgtatggaggaggaggaagtatgtgaccccaaattccattatgacaacacagcaggaatcagtcagtatctgcagaacagtaagcgaaagagccggcctgtgagtgtaaaaacatttgaagatatcccgttagaagaaccagaagtaaaagtaatcccagatgacaaccagacggacagtggtatggttcttgcctcagaagagctgaaaactttggaagacagaaccaaattatctccatcttttggtggaatggtgcccagcaaaagcagggagtctgtggcatctgaaggctcaaaccagacaagcggctaccagtccggatatcactccgatgacacagacaccaccgtgtactccagtgaggaagcagaacttttaaagctgatagagattggagtgcaaaccggtagcacagcccagattctccagcctgactcggggaccacactgagctctcctcctgtttaaaaggaagcatccacacccccaactcctggacatcacatgagaggtgctgctcagattttcaagtgttgttctttccaccagcaggaagtagccgcatttgattttcatttcgacaacagaaaaaggacctcggactgcagggagccagtcttctaggcatatcctggaagaggcttgtgacccaagaatgtgtctgtgtcttctcccagtgttgacctgatcctctttttcattcatttaaaaagcatttatcatgccccctgctgcgggtctcaccatgggtttagaacaaagacgttcaagaaatggccccatcctcaaagaagtagcagtacctggggagctgacacttctgtaaaactagaagataaaccaggcaatgtaagtgttcgaggtgttgaagatgggaaggatttgcagggctgagtctatccaagaggctttgtttaggacgtgggtcccaagccaagccttaagtgtggaattcggattgatagaaaggaagactaacgttaccttgctttggagagtactggagcctgcaaatgcattgtgtttgctctggtggaggtgggcatggggtctgttctgaaatgtaaagggttcagacggggtttctggttttagaaggttgcgtgttcttcgagttgggctaaagtagagttcgttgtgctgtttctgactcctaatgagagttccttccagaccgttacgtgtctcctggccaagccccaggaaggaaatgatgcagctctggctccttgtctcccaggctgatcctttattcagaataccacaaagaaaggacattcagctcaaggctccctgccgtgttgaagagttctgactgcacaaaccagcttctggtttcttctggaatgaataccctcatatctgtcctgatgtgatatgtctgagactgaatgcgggaggttcaatgtgaagctgtgtgtggtgtcaaagtttcaggaaggattttacccttttgttcttccccctgtccccaacccactctcaccccgcaacccatcagtattttagttatttggcctctactccagtaaacctgattgggtttgttcactctctgaatgattattagccagacttcaaaattattttatagcccaaattataacatctattgtattatttagacttttaacatatagagctatttctactgatttttgcccttgttctgtcctttttttcaaaaaagaaaatgtgttttttgtttggtaccatagtgtgaaatgctgggaacaatgactataagacatgctatggcacatatatttatagtctgtttatgtagaaacaaatgtaatatattaaagccttatatataatgaactttgtactattcacattttgtatcagtattatgtagcataacaaaggtcataatgctttcagcaattgatgtcattttattaaagaacattg

SEQ ID NO: 10 - DNA, 4632 bp, Homo sapiens
gccctcgccgcccgcggcgccccgagcgctttgtgagcagatgcggagccgagtggagggcgcgagccagatgcggggcgacagctgacttgctgagaggaggcggggaggcgcggagcgcgcgtgtggtccttgcgccgctgacttctccactggttcctgggcaccgaaagataaacctctcataatgaaggcccccgctgtgcttgcacctggcatcctcgtgctcctgtttaccttggtgcagaggagcaatggggagtgtaaagaggcactagcaaagtccgagatgaatgtgaatatgaagtatcagcttcccaacttcaccgcggaaacacccatccagaatgtcattctacatgagcatcacattttccttggtgccactaactacatttatgttttaaatgaggaagaccttcagaaggttgctgagtacaagactgggcctgtgctggaacacccagattgtttcccatgtcaggactgcagcagcaaagccaatttatcaggaggtgtttggaaagataacatcaacatggctctagttgtcgacacctactatgatgatcaactcattagctgtggcagcgtcaacagagggacctgccagcgacatgtctttccccacaatcatactgctgacatacagtcggaggttcactgcatattctccccacagatagaagagcccagccagtgtcctgactgtgtggtgagcgccctgggagccaaagtcctttcatctgtaaaggaccggttcatcaacttctttgtaggcaataccataaattcttcttatttcccagatcatccattgcattcgatatcagtgagaaggctaaaggaaacgaaagatggttttatgtttttgacggaccagtcctacattgatgttttacctgagttcagagattcttaccccattaagtatgtccatgcctttgaaagcaacaattttatttacttcttgacggtccaaagggaaactctagatgctcagacttttcacacaagaataatcaggttctgttccataaactctggattgcattcctacatggaaatgcctctggagtgtattctcacagaaaagagaaaaaagagatccacaaagaaggaagtgtttaatatacttcaggctgcgtatgtcagcaagcctggggcccagcttgctagacaaataggagccagcctgaatgatgacattcttttcggggtgttcgcacaaagcaagccagattctgccgaaccaatggatcgatctgccatgtgtgcattccctatcaaatatgtcaacgacttcttcaacaagatcgtcaacaaaaacaatgtgagatgtctccagcatttttacggacccaatcatgagcactgctttaataggacacttctgagaaattcatcaggctgtgaagcgcgccgtgatgaatatcgaacagagtttaccacagctttgcagcgcgttgacttattcatgggtcaattcagcgaagtcctcttaacatctatatccaccttcattaaaggagacctcaccatagctaatcttgggacatcagagggtcgcttcatgcaggttgtggtttctcgatcaggaccatcaacccctcatgtgaattttctcctggactcccatccagtgtctccagaagtgattgtggagcatacattaaaccaaaatggctacacactggttatcactgggaagaagatcacgaagatcccattgaatggcttgggctgcagacatttccagtcctgcagtcaatgcctctctgccccaccctttgttcagtgtggctggtgccacgacaaatgtgtgcgatcggaggaatgcctgagcgggacatggactcaacagatctgtctgcctgcaatctacaaggttttcccaaatagtgcaccccttgaaggagggacaaggctgaccatatgtggctgggactttggatttcggaggaataataaatttgatttaaagaaaactagagttctccttggaaatgagagctgcaccttgactttaagtgagagcacgatgaatacattgaaatgcacagttggtcctgccatgaataagcatttcaatatgtccataattatttcaaatggccacgggacaacacaatacagtacattctcctatgtggatcctgtaataacaagtatttcgccgaaatacggtcctatggctggtggcactttacttactttaactggaaattacctaaacagtgggaattctagacacatttcaattggtggaaaaacatgtactttaaaaagtgtgtcaaacagtattcttgaatgttataccccagcccaaaccatttcaactgagtttgctgttaaattgaaaattgacttagccaaccgagagacaagcatcttcagttaccgtgaagatcccattgtctatgaaattcatccaaccaaatcttttattagtacttggtggaaagaacctctcaacattgtcagttttctattttgctttgccagtggtgggagcacaataacaggtgttgggaaaaacctgaattcagttagtgtcccgagaatggtcataaatgtgcatgaagcaggaaggaactttacagtggcatgtcaacatcgctctaattcagagataatctgttgtaccactccttccctgcaacagctgaatctgcaactccccctgaaaaccaaagcctttttcatgttagatgggatcctttccaaatactttgatctcatttatgtacataatcctgtgtttaagccttttgaaaagccagtgatgatctcaatgggcaatgaaaatgtactggaaattaagggaaatgatattgaccctgaagcagttaaaggtgaagtgttaaaagttggaaataagagctgtgagaatatacacttacattctgaagccgttttatgcacggtccccaatgacctgctgaaattgaacagcgagctaaatatagagtggaagcaagcaatttcttcaaccgtccttggaaaagtaatagttcaaccagatcagaatttcacaggattgattgctggtgttgtctcaatatcaacagcactgttattactacttgggtttttcctgtggctgaaaaagagaaagcaaattaaagatctgggcagtgaattagttcgctacgatgcaagagtacacactcctcatttggataggcttgtaagtgcccgaagtgtaagcccaactacagaaatggtttcaaatgaatctgtagactaccgagctacttttccagaagatcagtttcctaattcatctcagaacggttcatgccgacaagtgcagtatcctctgacagacatgtcccccatcctaactagtggggactctgatatatccagtccattactgcaaaatactgtccacattgacctcagtgctctaaatccagagctggtccaggcagtgcagcatgtagtgattgggcccagtagcctgattgtgcatttcaatgaagtcataggaagagggcattttggttgtgtatatcatgggactttgttggacaatgatggcaagaaaattcactgtgctgtgaaatccttgaacagaatcactgacataggagaagtttcccaatttctgaccgagggaatcatcatgaaagattttagtcatcccaatgtcctctcgctcctgggaatctgcctgcgaagtgaagggtctccgctggtggtcctaccatacatgaaacatggagatcttcgaaatttcattcgaaatgagactcataatccaactgtaaaagatcttattggctttggtcttcaagtagccaaaggcatgaaatatcttgcaagcaaaaagtttgtccacagagacttggctgcaagaaactgtatgctggatgaaaaattcacagtcaaggttgctgattttggtcttgccagagacatgtatgataaagaatactatagtgtacacaacaaaacaggtgcaaagctgccagtgaagtggatggctttggaaagtctgcaaactcaaaagtttaccaccaagtcagatgtgtggtcctttggcgtgctcctctgggagctgatgacaagaggagccccaccttatcctgacgtaaacacctttgatataactgtttacttgttgcaagggagaagactcctacaacccgaatactgcccagaccccttatatgaagtaatgctaaaatgctggcaccctaaagccgaaatgcgcccatccttttctgaactggtgtcccggatatcagcgatcttctctactttcattggggagcactatgtccatgtgaacgctacttatgtgaacgtaaaatgtgtcgctccgtatccttctctgttgtcatcagaagataacgctgatgatgaggtggacacacgaccagcctccttctgggagacatcatagtgctagtactatgtcaaagcaacagtccacactttgtccaatggttttttcactgcctgacctttaaaaggccatcgatattctttgctcttgccaaaattgcactattataggacttgtattgttatttaaattactggattctaaggaatttcttatctgacagagcatcagaaccagaggcttggtcccacaggccacggaccaatggcctgcag

SEQ ID NO: 11 - DNA, 15081 bp, Homo sapiens
ctgcttcacttcacggggcgaacatggcgcacagctgtcggtggcgcttccccgcccgacccgggaccaccgggggcggcggcggcggggggcgccggggcctagggggcgccccgcggcaacgcgtcccggccctgctgcttccccccgggcccccggtcggcggtggcggccccggggcgcccccctcccccccggctgtggcggccgcggcggcggcggcgggaagcagcggggctggggttccagggggagcggccgccgcctcagcagcctcctcgtcgtccgcctcgtcttcgtcttcgtcatcgtcctcagcctcttcagggccggccctgctccgggtgggcccgggcttcgacgcggcgctgcaggtctcggccgccatcggcaccaacctgcgccggttccgggccgtgtttggggagagcggcgggggaggcggcagcggagagctaacaacacagatcccatgtagttggagaaccaaaggccacatacatgacaaaaagactgaaccgttcaggttacttgcatggagttggtgcttaaatgatgagcaattcttaggttttggctcagatgaagaagtcagagtgcgaagtcccacaaggtctccttcagttaaaactagtcctcgaaaacctcgtgggagacctagaagtggctctgaccgaaattcagctatcctctcagatccatctgtgttttcccctctaaataaatcagagaccaaatctggagataagatcaagaagaaagattctaaaagtatagaaaagaagagaggaagacctcccaccttccctggagtaaaaatcaaaataacacatggaaaggacatttcagagttaccaaagggaaacaaagaagatagcctgaaaaaaattaaaaggacaccttctgctacgtttcagcaagccacaaagattaaaaaattaagagcaggtaaactctctcctctcaagtctaagtttaagacagggaagcttcaaataggaaggaagggggtacaaattgtacgacggagaggaaggcctccatcaacagaaaggataaagaccccttcgggtctcctcattaattctgaactggaaaagccccagaaagtccggaaagacaaggaaggaacacctccacttacaaaagaagataagacagttgtcagacaaagccctcgaaggattaagccagttaggattattccttcttcaaaaaggacagatgcaaccattgctaagcaactcttacagagggcaaaaaagggggctcaaaagaaaattgaaaaagaagcagctcagctgcagggaagaaaggtgaagacacaggtcaaaaatattcgacagttcatcatgcctgttgtcagtgctatctcctcgcggatcattaagacccctcggcggtttatagaggatgaggattatgaccctccaattaaaattgcccgattagagtctacaccgaatagtagattcagtgccccgtcctgtggatcttctgaaaaatcaagtgcagcttctcagcactcctctcaaatgtcttcagactcctctcgatctagtagccccagtgttgatacctccacagactctcaggcttctgaggagattcaggtacttcctgaggagcggagcgatacccctgaagttcatcctccactgcccatttcccagtccccagaaaatgagagtaatgataggagaagcagaaggtattcagtgtcggagagaagttttggatctagaacgacgaaaaaattatcaactctacaaagtgccccccagcagcagacctcctcgtctccacctccacctctgctgactccaccgccaccactgcagccagcctccagtatctctgaccacacaccttggcttatgcctccaacaatccccttagcatcaccatttttgcctgcttccactgctcctatgcaagggaagcgaaaatctattttgcgagaaccgacatttaggtggacttctttaaagcattctaggtcagagccacaatacttttcctcagcaaagtatgccaaagaaggtcttattcgcaaaccaatatttgataatttccgaccccctccactaactcccgaggacgttggctttgcatctggtttttctgcatctggtaccgctgcttcagcccgattgttttcgccactccattctggaacaaggtttgatatgcacaaaaggagccctcttctgagagctccaagatttactccaagtgaggctcactctagaatatttgagtctgtaaccttgcctagtaatcgaacttctgctggaacatcttcttcaggagtatccaatagaaaaaggaaaagaaaagtgtttagtcctattcgatctgaaccaagatctccttctcactccatgaggacaagaagtggaaggcttagtagttctgagctctcacctctcacccccccgtcttctgtctcttcctcgttaagcatttctgttagtcctcttgccactagtgccttaaacccaacttttacttttccttctcattccctgactcagtctggggaatctgcagagaaaaatcagagaccaaggaagcagactagtgctccggcagagccattttcatcaagtagtcctactcctctcttcccttggtttaccccaggctctcagactgaaagagggagaaataaagacaaggcccccgaggagctgtccaaagatcgagatgctgacaagagcgtggagaaggacaagagtagagagagagaccgggagagagaaaaggagaataagcgggagtcaaggaaagagaaaaggaaaaagggatcagaaattcagagtagttctgctttgtatcctgtgggtagggtttccaaagagaaggttgttggtgaagatgttgccacttcatcttctgccaaaaaagcaacagggcggaagaagtcttcatcacatgattctgggactgatattacttctgtgactcttggggatacaacagctgtcaaaaccaaaatacttataaagaaagggagaggaaatctggaaaaaaccaacttggacctcggcccaactgccccatccctggagaaggagaaaaccctctgcctttccactccttcatctagcactgttaaacattccacttcctccataggctccatgttggctcaggcagacaagcttccaatgactgacaagagggttgccagcctcctaaaaaaggccaaagctcagctctgcaagattgagaagagtaagagtcttaaacaaaccgaccagcccaaagcacagggtcaagaaagtgactcatcagagacctctgtgcgaggaccccggattaaacatgtctgcagaagagcagctgttgcccttggccgaaaacgagctgtgtttcctgatgacatgcccaccctgagtgccttaccatgggaagaacgagaaaagattttgtcttccatggggaatgatgacaagtcatcaattgctggctcagaagatgctgaacctcttgctccacccatcaaaccaattaaacctgtcactagaaacaaggcaccccaggaacctccagtaaagaaaggacgtcgatcgaggcggtgtgggcagtgtcccggctgccaggtgcctgaggactgtggtgtttgtactaattgcttagataagcccaagtttggtggtcgcaatataaagaagcagtgctgcaagatgagaaaatgtcagaatctacaatggatgccttccaaagcctacctgcagaagcaagctaaagctgtgaaaaagaaagagaaaaagtctaagaccagtgaaaagaaagacagcaaagagagcagtgttgtgaagaacgtggtggactctagtcagaaacctaccccatcagcaagagaggatcctgccccaaagaaaagcagtagtgagcctcctccacgaaagcccgtcgaggaaaagagtgaagaagggaatgtctcggcccctgggcctgaatccaaacaggccaccactccagcttccaggaagtcaagcaagcaggtctcccagccagcactggtcatcccgcctcagccacctactacaggaccgccaagaaaagaagttcccaaaaccactcctagtgagcccaagaaaaagcagcctccaccaccagaatcaggtccagagcagagcaaacagaaaaaagtggctccccgcccaagtatccctgtaaaacaaaaaccaaaagaaaaggaaaaaccacctccggtcaataagcaggagaatgcaggcactttgaacatcctcagcactctctccaatggcaatagttctaagcaaaaaattccagcagatggagtccacaggatcagagtggactttaaggaggattgtgaagcagaaaatgtgtgggagatgggaggcttaggaatcttgacttctgttcctataacacccagggtggtttgctttctctgtgccagtagtgggcatgtagagtttgtgtattgccaagtctgttgtgagcccttccacaagttttgtttagaggagaacgagcgccctctggaggaccagctggaaaattggtgttgtcgtcgttgcaaattctgtcacgtttgtggaaggcaacatcaggctacaaagcagctgctggagtgtaataagtgccgaaacagctatcaccctgagtgcctgggaccaaactaccccaccaaacccacaaagaagaagaaagtctggatctgtaccaagtgtgttcgctgtaagagctgtggatccacaactccaggcaaagggtgggatgcacagtggtctcatgatttctcactgtgtcatgattgcgccaagctctttgctaaaggaaacttctgccctctctgtgacaaatgttatgatgatgatgactatgagagtaagatgatgcaatgtggaaagtgtgatcgctgggtccattccaaatgtgagaatctttcagatgagatgtatgagattctatctaatctgccagaaagtgtggcctacacttgtgtgaactgtactgagcggcaccctgcagagtggcgactggcccttgaaaaagagctgcagatttctctgaagcaagttctgacagctttgttgaattctcggactaccagccatttgctacgctaccggcaggctgccaagcctccagacttaaatcccgagacagaggagagtataccttcccgcagctcccccgaaggacctgatccaccagttcttactgaggtcagcaaacaggatgatcagcagcctttagatctagaaggagtcaagaggaagatggaccaagggaattacacatctgtgttggagttcagtgatgatattgtgaagatcattcaagcagccattaattcagatggaggacagccagaaattaaaaaagccaacagcatggtcaagtccttcttcattcggcaaatggaacgtgtttttccatggttcagtgtcaaaaagtccaggttttgggagccaaataaagtatcaagcaacagtgggatgttaccaaacgcagtgcttccaccttcacttgaccataattatgctcagtggcaggagcgagaggaaaacagccacactgagcagcctcctttaatgaagaaaatcattccagctcccaaacccaaaggtcctggagaaccagactcaccaactcctctgcatcctcctacaccaccaattttgagtactgataggagtcgagaagacagtccagagctgaacccacccccaggcatagaagacaatagacagtgtgcgttatgtttgacttatggtgatgacagtgctaatgatgctggtcgtttactatatattggccaaaatgagtggacacatgtaaattgtgctttgtggtcagcggaagtgtttgaagatgatgacggatcactaaagaatgtgcatatggctgtgatcaggggcaagcagctgagatgtgaattctgccaaaagccaggagccaccgtgggttgctgtctcacatcctgcaccagcaactatcacttcatgtgttcccgagccaagaactgtgtctttctggatgataaaaaagtatattgccaacgacatcgggatttgatcaaaggcgaagtggttcctgagaatggatttgaagttttcagaagagtgtttgtggactttgaaggaatcagcttgagaaggaagtttctcaatggcttggaaccagaaaatatccacatgatgattgggtctatgacaatcgactgcttaggaattctaaatgatctctccgactgtgaagataagctctttcctattggatatcagtgttccagggtatactggagcaccacagatgctcgcaagcgctgtgtatatacatgcaagatagtggagtgccgtcctccagtcgtagagccggatatcaacagcactgttgaacatgatgaaaacaggaccattgcccatagtccaacatcttttacagaaagttcatcaaaagagagtcaaaacacagctgaaattataagtcctccatcaccagaccgacctcctcattcacaaacctctggctcctgttattatcatgtcatctcaaaggtccccaggattcgaacacccagttattctccaacacagagatcccctggctgtcgaccgttgccttctgcaggaagtcctaccccaaccactcatgaaatagtcacagtaggtgatcctttactctcctctggacttcgaagcattggctccaggcgtcacagtacctcttccttatcaccccagcggtccaaactccggataatgtctccaatgagaactgggaatacttactctaggaataatgtttcctcagtctccaccaccgggaccgctactgatcttgaatcaagtgccaaagtagttgatcatgtcttagggccactgaattcaagtactagtttagggcaaaacacttccacctcttcaaatttgcaaaggacagtggttactgtaggcaataaaaacagtcacttggatggatcttcatcttcagaaatgaagcagtccagtgcttcagacttggtgtccaagagctcctctttaaagggagagaagaccaaagtgctgagttccaagagctcagagggatctgcacataatgtggcttaccctggaattcctaaactggccccacaggttcataacacaacatctagagaactgaatgttagtaaaatcggctcctttgctgaaccctcttcagtgtcgttttcttctaaagaggccctctccttcccacacctccatttgagagggcaaaggaatgatcgagaccaacacacagattctacccaatcagcaaactcctctccagatgaagatactgaagtcaaaaccttgaagctatctggaatgagcaacagatcatccattatcaacgaacatatgggatctagttccagagataggagacagaaagggaaaaaatcctgtaaagaaactttcaaagaaaagcattccagtaaatcttttttggaacctggtcaggtgacaactggtgaggaaggaaacttgaagccagagtttatggatgaggttttgactcctgagtatatgggccaacgaccatgtaacaatgtttcttctgataagattggtgataaaggcctttctatgccaggagtccccaaagctccacccatgcaagtagaaggatctgccaaggaattacaggcaccacggaaacgcacagtcaaagtgacactgacacctctaaaaatggaaaatgagagtcaatccaaaaatgccctgaaagaaagtagtcctgcttcccctttgcaaatagagtcaacatctcccacagaaccaatttcagcctctgaaaatccaggagatggtccagtggcccaaccaagccccaataatacctcatgccaggattctcaaagtaacaactatcagaatcttccagtacaggacagaaacctaatgcttccagatggccccaaacctcaggaggatggctcttttaaaaggaggtatccccgtcgcagtgcccgtgcacgttctaacatgttttttgggcttaccccactctatggagtaagatcctatggtgaagaagacattccattctacagcagctcaactgggaagaagcgaggcaagagatcagctgaaggacaggtggatggggccgatgacttaagcacttcagatgaagacgacttatactattacaacttcactagaacagtgatttcttcaggtggagaggaacgactggcatcccataatttatttcgggaggaggaacagtgtgatcttccaaaaatctcacagttggatggtgttgatgatgggacagagagtgatactagtgtcacagccacaacaaggaaaagcagccagattccaaaaagaaatggtaaagaaaatggaacagagaacttaaagattgatagacctgaagatgctggggagaaagaacatgtcactaagagttctgttggccacaaaaatgagccaaagatggataactgccattctgtaagcagagttaaaacacagggacaagattccttggaagctcagctcagctcattggagtcaagccgcagagtccacacaagtaccccctccgacaaaaatttactggacacctataatactgagctcctgaaatcagattcagacaataacaacagtgatgactgtgggaatatcctgccttcagacattatggactttgtactaaagaatactccatccatgcaggctttgggtgagagcccagagtcatcttcatcagaactcctgaatcttggtgaaggattgggtcttgacagtaatcgtgaaaaagacatgggtctttttgaagtattttctcagcagctgcctacaacagaacctgtggatagtagtgtctcttcctctatctcagcagaggaacagtttgagttgcctctagagctaccatctgatctgtctgtcttgaccacccggagtcccactgtccccagccagaatcccagtagactagctgttatctcagactcaggggagaagagagtaaccatcacagaaaaatctgtagcctcctctgaaagtgacccagcactgctgagcccaggagtagatccaactcctgaaggccacatgactcctgatcattttatccaaggacacatggatgcagaccacatctctagccctccttgtggttcagtagagcaaggtcatggcaacaatcaggatttaactaggaacagtagcacccctggccttcaggtacctgtttccccaactgttcccatccagaaccagaagtatgtgcccaattctactgatagtcctggcccgtctcagatttccaatgcagctgtccagaccactccaccccacctgaagccagccactgagaaactcatagttgttaaccagaacatgcagccactttatgttctccaaactcttccaaatggagtgacccaaaaaatccaattgacctcttctgttagttctacacccagtgtgatggagacaaatacttcagtattgggacccatgggaggtggtctcacccttaccacaggactaaatccaagcttgccaacttctcaatctttgttcccttctgctagcaaaggattgctacccatgtctcatcaccagcacttacattccttccctgcagctactcaaagtagtttcccaccaaacatcagcaatcctccttcaggcctgcttattggggttcagcctcctccggatccccaacttttggtttcagaatccagccagaggacagacctcagtaccacagtagccactccatcctctggactcaagaaaagacccatatctcgtctacagacccgaaagaataaaaaacttgctccctctagtaccccttcaaacattgccccttctgatgtggtttctaatatgacattgattaacttcacaccctcccagcttcctaatcatccaagtctgttagatttggggtcacttaatacttcatctcaccgaactgtccccaacatcataaaaagatctaaatctagcatcatgtattttgaaccggcacccctgttaccacagagtgtgggaggaactgctgccacagcggcaggcacatcaacaataagccaggatactagccacctcacatcagggtctgtgtctggcttggcatccagttcctctgtcttgaatgttgtatccatgcaaactaccacaacccctacaagtagtgcgtcagttccaggacacgtcaccttaaccaacccaaggttgcttggtaccccagatattggctcaataagcaatcttttaatcaaagctagccagcagagcctggggattcaggaccagcctgtggctttaccgccaagttcaggaatgtttccacaactggggacatcacagaccccctctactgctgcaataacagcggcatctagcatctgtgtgctcccctccactcagactacgggcataacagccgcttcaccttctggggaagcagacgaacactatcagcttcagcatgtgaaccagctccttgccagcaaaactgggattcattcttcccagcgtgatcttgattctgcttcagggccccaggtatccaactttacccagacggtagacgctcctaatagcatgggactggagcagaacaaggctttatcctcagctgtgcaagccagccccacctctcctgggggttctccatcctctccatcttctggacagcggtcagcaagcccttcagtgccgggtcccactaaacccaaaccaaaaaccaaacggtttcagctgcctctagacaaagggaatggcaagaagcacaaagtttcccatttgcggaccagttcttctgaagcacacattccagaccaagaaacgacatccctgacctcaggcacagggactccaggagcagaggctgagcagcaggatacagctagcgtggagcagtcctcccagaaggagtgtgggcaacctgcagggcaagtcgctgttcttccggaagttcaggtgacccaaaatccagcaaatgaacaagaaagtgcagaacctaaaacagtggaagaagaggaaagtaatttcagctccccactgatgctttggcttcagcaagaacaaaagcggaaggaaagcattactgagaaaaaacccaagaaaggacttgtttttgaaatttccagtgatgatggctttcagatctgtgcagaaagtattgaagatgcctggaagtcattgacagataaagtccaggaagctcgatcaaatgcccgcctaaagcagctctcatttgcaggtgttaacggtttgaggatgctggggattctccatgatgcagttgtgttcctcattgagcagctgtctggtgccaagcactgtcgaaattacaaattccgtttccacaagccagaggaggccaatgaaccccccttgaaccctcacggctcagccagggctgaagtccacctcaggaagtcagcatttgacatgtttaacttcctggcttctaaacatcgtcagcctcctgaatacaaccccaatgatgaagaagaggaggaggtacagctgaagtcagctcggagggcaactagcatggatctgccaatgcccatgcgcttccggcacttaaaaaagacttctaaggaggcagttggtgtctacaggtctcccatccatggccggggtcttttctgtaagagaaacattgatgcaggtgagatggtgattgagtatgccggcaacgtcatccgctccatccagactgacaagcgggaaaagtattacgacagcaagggcattggttgctatatgttccgaattgatgactcagaggtagtggatgccaccatgcatggaaatgctgcacgcttcatcaatcactcgtgtgagcctaactgctattctcgggtcatcaatattgatgggcagaagcacattgtcatctttgccatgcgtaagatctaccgaggagaggaactcacttacgactataagttccccattgaggatgccagcaacaagctgccctgcaactgtggcgccaagaaatgccggaagttcctaaactaaagctgctcttctcccccagtgttggagtgcaaggaggcggggccatccaaagcaacgctgaaggccttttccagcagctgggagctcccggattgcgtggcacagctgaggggcctctgtgatggctgagctctcttatgtcctatactcacatcagacatgtgatcatagtcccagagacagagttgaggtctcgaagaaaagatccatgatcggctttctcctggggcccctccaattgtttactgttagaaagtgggaatggggtccctagcagacttgcctggaaggagcctattatagagggttggttatgttgggagattgggcctgaatttctccacagaaataagttgccatcctcaggttggccctttcccaagcactgtaagtgagtgggtcaggcaaagccccaaatggagggttggttagattcctgacagtttgccagccaggccccacctacagcgtctgtcgaacaaacagaggtctggtggttttccctactatcctcccactcgagagttcacttctggttgggagacaggattcctagcacctccggtgtcaaaaggctgtcatggggttgtgccaattaattaccaaacattgagcctgcaggctttgagtgggagtgttgcccccaggagccttatctcagccaattacctttcttgacagtaggagcggcttccctctcccattccctcttcactcccttttcttcctttcccctgtcttcatgccactgctttcccatgcttctttcgggttgtaggggagactgactgcctgctcaaggacactccctgctgggcataggatgtgcctgcaaaaagttccctgagcctgtaagcactccaggtggggaagtggacaggagccattggtcataaccagacagaatttggaaacattttcataaagctccatggagagttttaaagaaacatatgtagcatgattttgtaggagaggaaaaagattatttaaataggatttaaatcatgcaacaacgagagtatcacagccaggatgacccttgggtcccattcctaagacatggttactttattttccccttgttaagacataggaagacttaatttttaaacggtcagtgtccagttgaaggcagaacactaatcagatttcaaggcccacaacttggggactagaccaccttatgttgagggaactctgccacctgcgtgcaacccacagctaaagtaaattcaatgacactactgccctgattactccttaggatgtggtcaaaacagcatcaaatgtttcttctcttcctttccccaagacagagtcctgaacctgttaaattaagtcattggattttactctgttctgtttacagtttactatttaaggttttataaatgtaaatatattttgtatatttttctatgagaagcacttcatagggagaagcacttatgacaaggctattttttaaaccgcggtattatcctaatttaaaagaagatcggtttttaataattttttattttcataggatgaagttagagaaaatattcagctgtacacacaaagtctggtttttcctgcccaacttccccctggaaggtgtactttttgttgtttaatgtgtagcttgtttgtgccctgttgacataaatgtttcctgggtttgctctttgacaataaatggagaaggaaggtcacccaactccattgggccactcccctccttcccctattgaagctcctcaaaaggctacagtaatatcttgatacaacagattctcttctttcccgcctctctcctttccggcgcaacttccagagtggtgggagacggcaatctttacatttccctcatctttcttacttcagagttagcaaacaacaagttgaatggcaacttgacatttttgcatcaccatctgcctcataggccactctttcctttccctctgcccaccaagtcctcatatctgcagagaacccattgatcaccttgtgccctcttttggggcagcctgttgaaactgaagcacagtctgaccactcacgataaagcagatttttctctgcctctgccacaaggtttcagagtagtgtagtccaagtagagggtggggcacccttttctcgccgcaagaagcccattcctatggaagtctagcaaagcaatacgactcagcccagcactctctgccccaggactcatggctctgctgtgccttccatcctgggctcccttctctcctgtgaccttaagaactttgtctggtggctttgctggaacattgtcactgttttcactgtcatgcagggagcccagcactgtggccaggatggcagagacttccttgtcatcatggagaagtgccagcaggggactgggaaaagcactctacccagacctcacctcccttcctccttttgcccatgaacaagatgcagtggccctaggggttccactagtgtctgctttcctttattattgcactgtgtgaggtttttttgtaaatccttgtattcctattttttttaaagaaaaaaaaaaaaccttaagctgcatttgttactgaaatgattaatgcactgatgggtcctgaattcaccttgagaaagacccaaaggccagtcagggggtggggggaactcagctaaatagacctagttactgccctgctaggccatgctgtactgtgagcccctcctcactctctaccaaccctaaaccctgaggacaggggaggaacccacagcttccttctcctgccagctgcagatggtttgccttgcctttccaccccctaattgtcaaccacaaaaatgagaaattcctcttctagctcagccttgagtccattgccaaattttcagcacacctgccagcaacttgggggaataagcgaaggtttccctacaagagggaaagaaggcaaaaacggcacagctatctccaaacacatctgagttcatttcaaaagtgaccaagggaatctccgcacaaaagtgcagattgaggaattgtgatgggtcattcccaagaatcccccaa

SEQ ID NO: 12 - DNA, 9009 bp, Homo sapiens
ctccccctcccgctcggcgctgaccccccatccccacccccgtgggaacactgggagcctgcactccacagaccctctccttgcctcttccctcacctcagcctccgctccccgccctcttcccggcccagggcgccggcccacccttccctccgccgccccccggccgcggggaggacatggccgcgcacaggccggtggaatgggtccaggccgtggtcagccgcttcgacgagcagcttccaataaaaacaggacagcagaacacacataccaaagtcagtactgagcacaacaaggaatgtctaatcaatatttccaaatacaagttttctttggttataagcggcctcactactattttaaagaatgttaacaatatgagaatatttggagaagctgctgaaaaaaatttatatctctctcagttgattatattggatacactggaaaaatgtcttgctgggcaaccaaaggacacaatgagattagatgaaacgatgctggtcaaacagttgctgccagaaatctgccattttcttcacacctgtcgtgaaggaaaccagcatgcagctgaacttcggaattctgcctctggggttttattttctctcagctgcaacaacttcaatgcagtctttagtcgcatttctaccaggttacaggaattaactgtttgttcagaagacaatgttgatgttcatgatatagaattgttacagtatatcaatgtggattgtgcaaaattaaaacgactcctgaaggaaacagcatttaaatttaaagccctaaagaaggttgcgcagttagcagttataaatagcctggaaaaggcattttggaactgggtagaaaattatccagatgaatttacaaaactgtaccagatcccacagactgatatggctgaatgtgcagaaaagctatttgacttggtggatggttttgctgaaagcaccaaacgtaaagcagcagtttggccactacaaatcattctccttatcttgtgtccagaaataatccaggatatatccaaagacgtggttgatgaaaacaacatgaataagaagttatttctggacagtctacgaaaagctcttgctggccatggaggaagtaggcagctgacagaaagtgctgcaattgcctgtgtcaaactgtgtaaagcaagtacttacatcaattgggaagataactctgtcattttcctacttgttcagtccatggtggttgatcttaagaacctgctttttaatccaagtaagccattctcaagaggcagtcagcctgcagatgtggatctaatgattgactgccttgtttcttgctttcgtataagccctcacaacaaccaacactttaagatctgcctggctcagaattcaccttctacatttcactatgtgctggtaaattcactccatcgaatcatcaccaattccgcattggattggtggcctaagattgatgctgtgtattgtcactcggttgaacttcgaaatatgtttggtgaaacacttcataaagcagtgcaaggttgtggagcacacccagcaatacgaatggcaccgagtcttacatttaaagaaaaagtaacaagccttaaatttaaagaaaaacctacagacctggagacaagaagctataagtatcttctcttgtccatggtgaaactaattcatgcagatccaaagctcttgctttgtaatccaagaaaacaggggcccgaaacccaaggcagtacagcagaattaattacagggctcgtccaactggtccctcagtcacacatgccagagattgctcaggaagcaatggaggctctgctggttcttcatcagttagatagcattgatttgtggaatcctgatgctcctgtagaaacattttgggagattagctcacaaatgcttttttacatctgcaagaaattaactagtcatcaaatgcttagtagcacagaaattctcaagtggttgcgggaaatattgatctgcaggaataaatttcttcttaaaaataagcaggcagatagaagttcctgtcactttctccttttttacggggtaggatgtgatattccttctagtggaaataccagtcaaatgtccatggatcatgaagaattactacgtactcctggagcctctctccggaagggaaaagggaactcctctatggatagtgcagcaggatgcagcggaacccccccgatttgccgacaagcccagaccaaactagaagtggccctgtacatgtttctgtggaaccctgacactgaagctgttctggttgccatgtcctgtttccgccacctctgtgaggaagcagatatccggtgtggggtggatgaagtgtcagtgcataacctcttgcccaactataacacattcatggagtttgcctctgtcagcaatatgatgtcaacaggaagagcagcacttcagaaaagagtgatggcactgctgaggcgcattgagcatcccactgcaggaaacactgaggcttgggaagatacacatgcaaaatgggaacaagcaacaaagctaatccttaactatccaaaagccaaaatggaagatggccaggctgctgaaagccttcacaagaccattgttaagaggcgaatgtcccatgtgagtggaggaggatccatagatttgtctgacacagactccctacaggaatggatcaacatgactggcttcctttgtgcccttgggggagtgtgcctccagcagagaagcaattctggcctggcaacctatagcccacccatgggtccagtcagtgaacgtaagggttctatgatttcagtgatgtcttcagagggaaacgcagatacacctgtcagcaaatttatggatcggctgttgtccttaatggtgtgtaaccatgagaaagtgggacttcaaatacggaccaatgttaaggatctggtgggtctagaattgagtcctgctctgtatccaatgctatttaacaaattgaagaataccatcagcaagttttttgactcccaaggacaggttttattgactgataccaatactcaatttgtagaacaaaccatagctataatgaagaacttgctagataatcatactgaaggcagctctgaacatctagggcaagctagcattgaaacaatgatgttaaatctggtcaggtatgttcgtgtgcttgggaatatggtccatgcaattcaaataaaaacgaaactgtgtcaattagttgaagtaatgatggcaaggagagatgacctctcattttgccaagagatgaaatttaggaataagatggtagaatacctgacagactgggttatgggaacatcaaaccaagcagcagatgatgatgtaaaatgtcttacaagagatttggaccaggcaagcatggaagcagtagtttcacttctagctggtctccctctgcagcctgaagaaggagatggtgtggaattgatggaagccaaatcacagttatttcttaaatacttcacattatttatgaaccttttgaatgactgcagtgaagttgaagatgaaagtgcgcaaacaggtggcaggaaacgtggcatgtctcggaggctggcatcactgaggcactgtacggtccttgcaatgtcaaacttactcaatgccaacgtagacagtggtctcatgcactccataggcttaggttaccacaaggatctccagacaagagctacatttatggaagttctgacaaaaatccttcaacaaggcacagaatttgacacacttgcagaaacagtattggctgatcggtttgagagattggtggaactggtcacaatgatgggtgatcaaggagaactccctatagcgatggctctggccaatgtggttccttgttctcagtgggatgaactagctcgagttctggttactctgtttgattctcggcatttactctaccaactgctctggaacatgttttctaaagaagtagaattggcagactccatgcagactctcttccgaggcaacagcttggccagtaaaataatgacattctgtttcaaggtatatggtgctacctatctacaaaaactcctggatcctttattacgaattgtgatcacatcctctgattggcaacatgttagctttgaagtggatcctaccaggttagaaccatcagagagccttgaggaaaaccagcggaacctccttcagatgactgaaaagttcttccatgccatcatcagttcctcctcagaattcccccctcaacttcgaagtgtgtgccactgtttataccaggcaacttgccactccctactgaataaagctacagtaaaagaaaaaaaggaaaacaaaaaatcagtggttagccagcgtttccctcagaacagcatcggtgcagtaggaagtgccatgttcctcagatttatcaatcctgccattgtctcaccgtatgaagcagggattttagataaaaagccaccacctagaatcgaaaggggcttgaagttaatgtcaaagatacttcagagtattgccaatcatgttctcttcacaaaagaagaacatatgcggcctttcaatgattttgtgaaaagcaactttgatgcagcacgcaggtttttccttgatatagcatctgattgtcctacaagtgatgcagtaaatcatagtctttccttcataagtgacggcaatgtgcttgctttacatcgtctactctggaacaatcaggagaaaattgggcagtatctttccagcaacagggatcataaagctgttggaagacgaccttttgataagatggcaacacttcttgcatacctgggtcctccagagcacaaacctgtggcagatacacactggtccagccttaaccttaccagttcaaagtttgaggaatttatgactaggcatcaggtacatgaaaaagaagaattcaaggctttgaaaacgttaagtattttctaccaagctgggacttccaaagctgggaatcctattttttattatgttgcacggaggttcaaaactggtcaaatcaatggtgatttgctgatataccatgtcttactgactttaaagccatattatgcaaagccatatgaaattgtagtggaccttacccataccgggcctagcaatcgctttaaaacagactttctctctaagtggtttgttgtttttcctggctttgcttacgacaacgtctccgcagtctatatctataactgtaactcctgggtcagggagtacaccaagtatcatgagcggctgctgactggcctcaaaggtagcaaaaggcttgttttcatagactgtcctgggaaactggctgagcacatagagcatgaacaacagaaactacctgctgccaccttggctttagaagaggacctgaaggtattccacaatgctctcaagctagctcacaaagacaccaaagtttctattaaagttggttctactgctgtccaagtaacttcagcagagcgaacaaaagtcctagggcaatcagtctttctaaatgacatttattatgcttcggaaattgaagaaatctgcctagtagatgagaaccagttcaccttaaccattgcaaaccagggcacgccgctcaccttcatgcaccaggagtgtgaagccattgtccagtctatcattcatatccggacccgctgggaactgtcacagcccgactctatcccccaacacaccaagattcggccaaaagatgtccctgggacactgctcaatatcgcattacttaatttaggcagttctgacccgagtttacggtcagctgcctataatcttctgtgtgccttaacttgtacctttaatttaaaaatcgagggccagttactagagacatcaggtttatgtatccctgccaacaacaccctctttattgtctctattagtaagacactggcagccaatgagccacacctcacgttagaatttttggaagagtgtatttctggatttagcaaatctagtattgaattgaaacacctttgtttggaatacatgactccatggctgtcaaatctagttcgtttttgcaagcataatgatgatgccaaacgacaaagagttactgctattcttgacaagctgataacaatgaccatcaatgaaaaacagatgtacccatctattcaagcaaaaatatggggaagccttgggcagattacagatctgcttgatgttgtactagacagtttcatcaaaaccagtgcaacaggtggcttgggatcaataaaagctgaggtgatggcagatactgctgtagctttggcttctggaaatgtgaaattggtttcaagcaaggttattggaaggatgtgcaaaataattgacaagacatgcttatctccaactcctactttagaacaacatcttatgtgggatgatattgctattttagcacgctacatgctgatgctgtccttcaacaattcccttgatgtggcagctcatcttccctacctcttccacgttgttactttcttagtagccacaggtccgctctcccttagagcttccacacatggactggtcattaatatcattcactctctgtgtacttgttcacagcttcattttagtgaagagaccaagcaagttttgagactcagtctgacagagttctcattacccaaattttacttgctgtttggcattagcaaagtcaagtcagctgctgtcattgccttccgttccagttaccgggacaggtcattctctcctggctcctatgagagagagacttttgctttgacatccttggaaacagtcacagaagctttgttggagatcatggaggcatgcatgagagatattccaacgtgcaagtggctggaccagtggacagaactagctcaaagatttgcattccaatataatccatccctgcaaccaagagctcttgttgtctttgggtgtattagcaaacgagtgtctcatgggcagataaagcagataatccgtattcttagcaaggcacttgagagttgcttaaaaggacctgacacttacaacagtcaagttctgatagaagctacagtaatagcactaaccaaattacagccacttcttaataaggactcgcctctgcacaaagccctcttttgggtagctgtggctgtgctgcagcttgatgaggtcaacttgtattcagcaggtaccgcacttcttgaacaaaacctgcatactttagatagtctccgtatattcaatgacaagagtccagaggaagtatttatggcaatccggaatcctctggagtggcactgcaagcaaatggatcattttgttggactcaatttcaactctaactttaactttgcattggttggacaccttttaaaagggtacaggcatccttcacctgctattgttgcaagaacagtcagaattttacatacactactaactctggttaacaaacacagaaattgtgacaaatttgaagtgaatacacagagcgtggcctacttagcagctttacttacagtgtctgaagaagttcgaagtcgctgcagcctaaaacatagaaagtcacttcttcttactgatatttcaatggaaaatgttcctatggatacatatcccattcatcatggtgacccttcctataggacactaaaggagactcagccatggtcctctcccaaaggttctgaaggataccttgcagccacctatccaactgtcggccagaccagtccccgagccaggaaatccatgagcctggacatggggcaaccttctcaggccaacactaagaagttgcttggaacaaggaaaagttttgatcacttgatatcagacacaaaggctcctaaaaggcaagaaatggaatcagggatcacaacaccccccaaaatgaggagagtagcagaaactgattatgaaatggaaactcagaggatttcctcatcacaacagcacccacatttacgtaaagtttcagtgtctgaatcaaatgttctcttggatgaagaagtacttactgatccgaagatccaggcgctgcttcttactgttctagctacactggtaaaatataccacagatgagtttgatcaacgaattctttatgaatacttagcagaggccagtgttgtgtttcccaaagtctttcctgttgtgcataatttgttggactctaagatcaacaccctgttatcattgtgccaagatccaaatttgttaaatccaatccatggaattgtgcagagtgtggtgtaccatgaagaatccccaccacaataccaaacatcttacctgcaaagttttggttttaatggcttgtggcggtttgcaggaccgttttcaaagcaaacacaaattccagactatgctgagcttattgttaagtttcttgatgccttgattgacacgtacctgcctggaattgatgaagaaaccagtgaagaatccctcctgactcccacatctccttaccctcctgcactgcagagccagcttagtatcactgccaaccttaacctttctaattccatgacctcacttgcaacttcccagcattccccaggaatcgacaaggagaacgttgaactctcccctaccactggccactgtaacagtggacgaactcgccacggatccgcaagccaagtgcagaagcaaagaagcgctggcagtttcaaacgtaatagcattaagaagatcgtgtgaagcttgcttgctttcttttttaaaatcaacttaacatgggctcttcactagtgaccccttccctgtccttgccctttccccccatgttgtaatgctgcacttcctgttttataatgaacccatccggtttgccatgttgccagatgatcaactcttcgaagccttgcctaaatttaatgctgccttttctttaactttttttcttctacttttggcgtgtatctggtatatgtaagtgttcagaacaactgcaaagaaagtgggaggtcaggaaacttttaactgagaaatctcaattgtaagagaggat

SEQ ID NO: 13 - DNA, 6390 bp, Homo sapiens
ggtttttgagcccattactgttggagctacagggagagaaacagaggaggagactgcaagagatcattggaggccgtgggcacgctctttactccatgtgtgggacattcattgcggaataacatcggaggagaagtttcccagagctatggggacttcccatccggcgttcctggtcttaggctgtcttctcacagggctgagcctaatcctctgccagctttcattaccctctatccttccaaatgaaaatgaaaaggttgtgcagctgaattcatccttttctctgagatgctttggggagagtgaagtgagctggcagtaccccatgtctgaagaagagagctccgatgtggaaatcagaaatgaagaaaacaacagcggcctttttgtgacggtcttggaagtgagcagtgcctcggcggcccacacagggttgtacacttgctattacaaccacactcagacagaagagaatgagcttgaaggcaggcacatttacatctatgtgccagacccagatgtagcctttgtacctctaggaatgacggattatttagtcatcgtggaggatgatgattctgccattataccttgtcgcacaactgatcccgagactcctgtaaccttacacaacagtgagggggtggtacctgcctcctacgacagcagacagggctttaatgggaccttcactgtagggccctatatctgtgaggccaccgtcaaaggaaagaagttccagaccatcccatttaatgtttatgctttaaaagcaacatcagagctggatctagaaatggaagctcttaaaaccgtgtataagtcaggggaaacgattgtggtcacctgtgctgtttttaacaatgaggtggttgaccttcaatggacttaccctggagaagtgaaaggcaaaggcatcacaatgctggaagaaatcaaagtcccatccatcaaattggtgtacactttgacggtccccgaggccacggtgaaagacagtggagattacgaatgtgctgcccgccaggctaccagggaggtcaaagaaatgaagaaagtcactatttctgtccatgagaaaggtttcattgaaatcaaacccaccttcagccagttggaagctgtcaacctgcatgaagtcaaacattttgttgtagaggtgcgggcctacccacctcccaggatatcctggctgaaaaacaatctgactctgattgaaaatctcactgagatcaccactgatgtggaaaagattcaggaaataaggtatcgaagcaaattaaagctgatccgtgctaaggaagaagacagtggccattatactattgtagctcaaaatgaagatgctgtgaagagctatacttttgaactgttaactcaagttccttcatccattctggacttggtcgatgatcaccatggctcaactgggggacagacggtgaggtgcacagctgaaggcacgccgcttcctgatattgagtggatgatatgcaaagatattaagaaatgtaataatgaaacttcctggactattttggccaacaatgtctcaaacatcatcacggagatccactcccgagacaggagtaccgtggagggccgtgtgactttcgccaaagtggaggagaccatcgccgtgcgatgcctggctaagaatctccttggagctgagaaccgagagctgaagctggtggctcccaccctgcgttctgaactcacggtggctgctgcagtcctggtgctgttggtgattgtgatcatctcacttattgtcctggttgtcatttggaaacagaaaccgaggtatgaaattcgctggagggtcattgaatcaatcagcccagatggacatgaatatatttatgtggacccgatgcagctgccttatgactcaagatgggagtttccaagagatggactagtgcttggtcgggtcttggggtctggagcgtttgggaaggtggttgaaggaacagcctatggattaagccggtcccaacctgtcatgaaagttgcagtgaagatgctaaaacccacggccagatccagtgaaaaacaagctctcatgtctgaactgaagataatgactcacctggggccacatttgaacattgtaaacttgctgggagcctgcaccaagtcaggccccatttacatcatcacagagtattgcttctatggagatttggtcaactatttgcataagaatagggatagcttcctgagccaccacccagagaagccaaagaaagagctggatatctttggattgaaccctgctgatgaaagcacacggagctatgttattttatcttttgaaaacaatggtgactacatggacatgaagcaggctgatactacacagtatgtccccatgctagaaaggaaagaggtttctaaatattccgacatccagagatcactctatgatcgtccagcctcatataagaagaaatctatgttagactcagaagtcaaaaacctcctttcagatgataactcagaaggccttactttattggatttgttgagcttcacctatcaagttgcccgaggaatggagtttttggcttcaaaaaattgtgtccaccgtgatctggctgctcgcaacgtcctcctggcacaaggaaaaattgtgaagatctgtgactttggcctggccagagacatcatgcatgattcgaactatgtgtcgaaaggcagtacctttctgcccgtgaagtggatggctcctgagagcatctttgacaacctctacaccacactgagtgatgtctggtcttatggcattctgctctgggagatcttttcccttggtggcaccccttaccccggcatgatggtggattctactttctacaataagatcaagagtgggtaccggatggccaagcctgaccacgctaccagtgaagtctacgagatcatggtgaaatgctggaacagtgagccggagaagagaccctccttttaccacctgagtgagattgtggagaatctgctgcctggacaatataaaaagagttatgaaaaaattcacctggacttcctgaagagtgaccatcctgctgtggcacgcatgcgtgtggactcagacaatgcatacattggtgtcacctacaaaaacgaggaagacaagctgaaggactgggagggtggtctggatgagcagagactgagcgctgacagtggctacatcattcctctgcctgacattgaccctgtccctgaggaggaggacctgggcaagaggaacagacacagctcgcagacctctgaagagagtgccattgagacgggttccagcagttccaccttcatcaagagagaggacgagaccattgaagacatcgacatgatggatgacatcggcatagactcttcagacctggtggaagacagcttcctgtaactggcggattcgaggggttccttccacttctggggccacctctggatcccgttcagaaaaccactttattgcaatgcagaggttgagaggaggacttggttgatgtttaaagagaagttcccagccaagggcctcggggagcgttctaaatatgaatgaatgggatattttgaaatgaactttgtcagtgttgcctcttgcaatgcctcagtagcatctcagtggtgtgtgaagtttggagatagatggataagggaataataggccacagaaggtgaactttgtgcttcaaggacattggtgagagtccaacagacacaatttatactgcgacagaacttcagcattgtaattatgtaaataactctaaccaaggctgtgtttagattgtattaactatcttctttggacttctgaagagaccactcaatccatccatgtacttccctcttgaaacctgatgtcagctgctgttgaactttttaaagaagtgcatgaaaaaccatttttgaaccttaaaaggtactggtactatagcattttgctatcttttttagtgttaaagagataaagaataataattaaccaaccttgtttaatagatttgggtcatttagaagcctgacaactcattttcatattgtaatctatgtttataatactactactgttatcagtaatgctaaatgtgtaataatgtaacatgatttccctccagagaaagcacaatttaaaacaatccttactaagtaggtgatgagtttgacagtttttgacatttatattaaataacatgtttctctataaagtatggtaatagctttagtgaattaaatttagttgagcatagagaacaaagtaaaagtagtgttgtccaggaagtcagaatttttaactgtactgaataggttccccaatccatcgtattaaaaaacaattaactgccctctgaaataatgggattagaaacaaacaaaactcttaagtcctaaaagttctcaatgtagaggcataaacctgtgctgaacataacttctcatgtatattacccaatggaaaatataatgatcagcaaaaagactggatttgcagaagttttttttttttttttcttcatgcctgatgaaagctttggcgaccccaatatatgtattttttgaatctatgaacctgaaaagggtcagaaggatgcccagacatcagcctccttctttcaccccttaccccaaagagaaagagtttgaaactcgagaccataaagatattctttagtggaggctggatgtgcattagcctggatcctcagttctcaaatgtgtgtggcagccaggatgactagatcctgggtttccatccttgagattctgaagtatgaagtctgagggaaaccagagtctgtatttttctaaactccctggctgttctgatcggccagttttcggaaacactgacttaggtttcaggaagttgccatgggaaacaaataatttgaactttggaacagggttggcattcaaccacgcaggaagcctactatttaaatccttggcttcaggttagtgacatttaatgccatctagctagcaattgcgaccttaatttaactttccagtcttagctgaggctgagaaagctaaagtttggttttgacaggttttccaaaagtaaagatgctacttcccactgtatgggggagattgaactttccccgtctcccgtcttctgcctcccactccataccccgccaaggaaaggcatgtacaaaaattatgcaattcagtgttccaagtctctgtgtaaccagctcagtgttttggtggaaaaaacattttaagttttactgataatttgaggttagatgggaggatgaattgtcacatctatccacactgtcaaacaggttggtgtgggttcattggcattctttgcaatactgcttaattgctgataccatatgaatgaaacatgggctgtgattactgcaatcactgtgctatcggcagatgatgctttggaagatgcagaagcaataataaagtacttgactacctactggtgtaatctcaatgcaagccccaactttcttatccaactttttcatagtaagtgcgaagactgagccagattggccaattaaaaacgaaaacctgactaggttctgtagagccaattagacttgaaatacgtttgtgtttctagaatcacagctcaagcattctgtttatcgctcactctcccttgtacagccttattttgttggtgctttgcattttgatattgctgtgagccttgcatgacatcatgaggccggatgaaacttctcagtccagcagtttccagtcctaacaaatgctcccacctgaatttgtatatgactgcatttgtgtgtgtgtgtgtgttttcagcaaattccagatttgtttccttttggcctcctgcaaagtctccagaagaaaatttgccaatctttcctactttctatttttatgatgacaatcaaagccggcctgagaaacactatttgtgactttttaaacgattagtgatgtccttaaaatgtggtctgccaatctgtacaaaatggtcctatttttgtgaagagggacataagataaaatgatgttatacatcaatatgtatatatgtatttctatatagacttggagaatactgccaaaacatttatgacaagctgtatcactgccttcgtttatatttttttaactgtgataatccccacaggcacattaactgttgcacttttgaatgtccaaaatttatattttagaaataataaaaagaaagatacttacatgttcccaaaacaatggtgtggtgaatgtgtgagaaaaactaacttgatagggtctaccaatacaaaatgtattacgaatgcccctgttcatgtttttgttttaaaacgtgtaaatgaagatctttatatttcaataaatgatatataatttaaagtt

SEQ ID NO: 14 - DNA, 5711 bp, Homo sapiens
ctcctgaggctgccagcagccagcagtgactgcccgccctatctgggacccaggatcgctctgtgagcaacttggagccagagaggagatcaacaaggaggaggagagagccggcccctcagccctgctgcccagcagcagcctgtgctcgccctgcccaacgcagacagccagacccagggcggcccctctggcggctctgctcctcccgaaggatgcttggggagtgaggcgaagctgggccgctcctctcccctacagcagcccccttcctccatccctctgttctcctgagccttcaggagcctgcaccagtcctgcctgtccttctactcagctgttacccactctgggaccagcagtctttctgataactgggagagggcagtaaggaggacttcctggagggggtgactgtccagagcctggaactgtgcccacaccagaagccatcagcagcaaggacaccatgcggcttccgggtgcgatgccagctctggccctcaaaggcgagctgctgttgctgtctctcctgttacttctggaaccacagatctctcagggcctggtcgtcacacccccggggccagagcttgtcctcaatgtctccagcaccttcgttctgacctgctcgggttcagctccggtggtgtgggaacggatgtcccaggagcccccacaggaaatggccaaggcccaggatggcaccttctccagcgtgctcacactgaccaacctcactgggctagacacgggagaatacttttgcacccacaatgactcccgtggactggagaccgatgagcggaaacggctctacatctttgtgccagatcccaccgtgggcttcctccctaatgatgccgaggaactattcatctttctcacggaaataactgagatcaccattccatgccgagtaacagacccacagctggtggtgacactgcacgagaagaaaggggacgttgcactgcctgtcccctatgatcaccaacgtggcttttctggtatctttgaggacagaagctacatctgcaaaaccaccattggggacagggaggtggattctgatgcctactatgtctacagactccaggtgtcatccatcaacgtctctgtgaacgcagtgcagactgtggtccgccagggtgagaacatcaccctcatgtgcattgtgatcgggaatgaggtggtcaacttcgagtggacatacccccgcaaagaaagtgggcggctggtggagccggtgactgacttcctcttggatatgccttaccacatccgctccatcctgcacatccccagtgccgagttagaagactcggggacctacacctgcaatgtgacggagagtgtgaatgaccatcaggatgaaaaggccatcaacatcaccgtggttgagagcggctacgtgcggctcctgggagaggtgggcacactacaatttgctgagctgcatcggagccggacactgcaggtagtgttcgaggcctacccaccgcccactgtcctgtggttcaaagacaaccgcaccctgggcgactccagcgctggcgaaatcgccctgtccacgcgcaacgtgtcggagacccggtatgtgtcagagctgacactggttcgcgtgaaggtggcagaggctggccactacaccatgcgggccttccatgaggatgctgaggtccagctctccttccagctacagatcaatgtccctgtccgagtgctggagctaagtgagagccaccctgacagtggggaacagacagtccgctgtcgtggccggggcatgccccagccgaacatcatctggtctgcctgcagagacctcaaaaggtgtccacgtgagctgccgcccacgctgctggggaacagttccgaagaggagagccagctggagactaacgtgacgtactgggaggaggagcaggagtttgaggtggtgagcacactgcgtctgcagcacgtggatcggccactgtcggtgcgctgcacgctgcgcaacgctgtgggccaggacacgcaggaggtcatcgtggtgccacactccttgccctttaaggtggtggtgatctcagccatcctggccctggtggtgctcaccatcatctcccttatcatcctcatcatgctttggcagaagaagccacgttacgagatccgatggaaggtgattgagtctgtgagctctgacggccatgagtacatctacgtggaccccatgcagctgccctatgactccacgtgggagctgccgcgggaccagcttgtgctgggacgcaccctcggctctggggcctttgggcaggtggtggaggccacggctcatggcctgagccattctcaggccacgatgaaagtggccgtcaagatgcttaaatccacagcccgcagcagtgagaagcaagcccttatgtcggagctgaagatcatgagtcaccttgggccccacctgaacgtggtcaacctgttgggggcctgcaccaaaggaggacccatctatatcatcactgagtactgccgctacggagacctggtggactacctgcaccgcaacaaacacaccttcctgcagcaccactccgacaagcgccgcccgcccagcgcggagctctacagcaatgctctgcccgttgggctccccctgcccagccatgtgtccttgaccggggagagcgacggtggctacatggacatgagcaaggacgagtcggtggactatgtgcccatgctggacatgaaaggagacgtcaaatatgcagacatcgagtcctccaactacatggccccttacgataactacgttccctctgcccctgagaggacctgccgagcaactttgatcaacgagtctccagtgctaagctacatggacctcgtgggcttcagctaccaggtggccaatggcatggagtttctggcctccaagaactgcgtccacagagacctggcggctaggaacgtgctcatctgtgaaggcaagctggtcaagatctgtgactttggcctggctcgagacatcatgcgggactcgaattacatctccaaaggcagcacctttttgcctttaaagtggatggctccggagagcatcttcaacagcctctacaccaccctgagcgacgtgtggtccttcgggatcctgctctgggagatcttcaccttgggtggcaccccttacccagagctgcccatgaacgagcagttctacaatgccatcaaacggggttaccgcatggcccagcctgcccatgcctccgacgagatctatgagatcatgcagaagtgctgggaagagaagtttgagattcggccccccttctcccagctggtgctgcttctcgagagactgttgggcgaaggttacaaaaagaagtaccagcaggtggatgaggagtttctgaggagtgaccacccagccatccttcggtcccaggcccgcttgcctgggttccatggcctccgatctcccctggacaccagctccgtcctctatactgccgtgcagcccaatgagggtgacaacgactatatcatccccctgcctgaccccaaacccgaggttgctgacgagggcccactggagggttcccccagcctagccagctccaccctgaatgaagtcaacacctcctcaaccatctcctgtgacagccccctggagccccaggacgaaccagagccagagccccagcttgagctccaggtggagccggagccagagctggaacagttgccggattcggggtgccctgcgcctcgggcggaagcagaggatagcttcctgtagggggctggcccctaccctgccctgcctgaagctccccccctgccagcacccagcatctcctggcctggcctgaccgggcttcctgtcagccaggctgcccttatcagctgtccccttctggaagctttctgctcctgacgtgttgtgccccaaaccctggggctggcttaggaggcaagaaaactgcaggggccgtgaccagccctctgcctccagggaggccaactgactctgagccagggttcccccagggaactcagttttcccatatgtaaaatgggaaagttaggcttgatgacccagaatctaggattctctccctggctgacaggtggggagaccgaatccctccctgggaagattcttggagttactgaggtggtaaattaacttttttctgttcagccagctacccctcaaggaatcatagctctctcctcgcacttttatccacccaggagctagggaagagaccctagcctccctggctgctggctgagctagggcctagccttgagcagtgttgcctcatccagaagaaagccagtctcctccctatgatgccagtccctgcgttccctggcccgagctggtctggggccattaggcagcctaattaatgctggaggctgagccaagtacaggacacccccagcctgcagcccttgcccagggcacttggagcacacgcagccatagcaagtgcctgtgtccctgtccttcaggcccatcagtcctggggctttttctttatcaccctcagtcttaatccatccaccagagtctagaaggccagacgggccccgcatctgtgatgagaatgtaaatgtgccagtgtggagtggccacgtgtgtgtgccagtatatggccctggctctgcattggacctgctatgaggctttggaggaatccctcaccctctctgggcctcagtttccccttcaaaaaatgaataagtcggacttattaactctgagtgccttgccagcactaacattctagagtattccaggtggttgcacatttgtccagatgaagcaaggccatataccctaaacttccatcctgggggtcagctgggctcctgggagattccagatcacacatcacactctggggactcaggaaccatgccccttccccaggcccccagcaagtctcaagaacacagctgcacaggccttgacttagagtgacagccggtgtcctggaaagcccccagcagctgccccagggacatgggaagaccacgggacctctttcactacccacgatgacctccgggggtatcctgggcaaaagggacaaagagggcaaatgagatcacctcctgcagcccaccactccagcacctgtgccgaggtctgcgtcgaagacagaatggacagtgaggacagttatgtcttgtaaaagacaagaagcttcagatgggtaccccaagaaggatgtgagaggtgggcgctttggaggtttgcccctcacccaccagctgccccatccctgaggcagcgctccatgggggtatggttttgtcactgcccagacctagcagtgacatctcattgtccccagcccagtgggcattggaggtgccaggggagtcagggttgtagccaagacgcccccgcacggggagggttgggaagggggtgcaggaagctcaacccctctgggcaccaaccctgcattgcaggttggcaccttacttccctgggatccccagagttggtccaaggagggagagtgggttctcaatacggtaccaaagatataatcacctaggtttacaaatatttttaggactcacgttaactcacatttatacagcagaaatgctattttgtatgctgttgagtttttctatctgtgtacttttttttaagggaaagattttaatattaaacctggtgcttctcactc

SEQ ID NO: 15 - DNA, 2115 bp, Homo sapiens
atgagtgctgcagtgactgcagggaagctggcacgggcaccggccgaccctgggaaagccggggtccccggagttgcagctcccggagctccggcggcggctccaccggcgaaagagatcccggaggtcctagtggacccacgcagccggcggcgctatgtgcggggccgctttttgggcaagggcggctttgccaagtgcttcgagatctcggacgcggacaccaaggaggtgttcgcgggcaagattgtgcctaagtctctgctgctcaagccgcaccagagggagaagatgtccatggaaatatccattcaccgcagcctcgcccaccagcacgtcgtaggattccacggctttttcgaggacaacgacttcgtgttcgtggtgttggagctctgccgccggaggtctctcctggagctgcacaagaggaggaaagccctgactgagcctgaggcccgatactacctacggcaaattgtgcttggctgccagtacctgcaccgaaaccgagttattcatcgagacctcaagctgggcaaccttttcctgaatgaagatctggaggtgaaaataggggattttggactggcaaccaaagtcgaatatgacggggagaggaagaagaccctgtgtgggactcctaattacatagctcccgaggtgctgagcaagaaagggcacagtttcgaggtggatgtgtggtccattgggtgtatcatgtataccttgttagtgggcaaaccaccttttgagacttcttgcctaaaagagacctacctccggatcaagaagaatgaatacagtattcccaagcacatcaaccccgtggccgcctccctcatccagaagatgcttcagacagatcccactgcccgcccaaccattaacgagctgcttaatgacgagttctttacttctggctatatccctgcccgtctccccatcacctgcctgaccattccaccaaggttttcgattgctcccagcagcctggaccccagcaaccggaagcccctcacagtcctcaataaaggcttggagaaccccctgcctgagcgtccccgggaaaaagaagaaccagtggttcgagagacaggtgaggtggtcgactgccacctcagtgacatgctgcagcagctgcacagtgtcaatgcctccaagccctcggagcgtgggctggtcaggcaagaggaggctgaggatcctgcctgcatccccatcttctgggtcagcaagtgggtggactattcggacaagtacggccttgggtatcagctctgtgataacagcgtgggggtgctcttcaatgactcaacacgcctcatcctctacaatgatggtgacagcctgcagtacatagagcgtgacggcactgagtcctacctcaccgtgagttcccatcccaactccttgatgaagaagatcaccctccttaaatatttccgcaattacatgagcgagcacttgctgaaggcaggtgccaacatcacgccgcgcgaaggtgatgagctcgcccggctgccctacctacggacctggttccgcacccgcagcgccatcatcctgcacctcagcaacggcagcgtgcagatcaacttcttccaggatcacaccaagctcatcttgtgcccactgatggcagccgtgacctacatcgacgagaagcgggacttccgcacataccgcctgagtctcctggaggagtacggctgctgcaaggagctggccagccggctccgctacgcccgcactatggtggacaagctgctgagctcacgctcggccagcaaccgtctcaaggcctcctaatagctgccctcccctccggactggtgccctcctcactcccacctgcatctggggcccatactggttggctcccgcggtgccatgtctgcagtgtgccccccagccccggtggctgggcagagctgcatcatccttgcaggtgggggttgctgtataagttatttttgtacatgttcgggtgtgggttctacagccttgtccccctccccctcaaccccaccatatgaattgtacagaatatttctattgaattcggaactgtcctttccttggctttatgcacattaaacagatgtgaatatt

SEQ ID NO: 16 - DNA, 3236 bp, Homo sapiens
cgtggccctgtggcagccgagccatggtttctaaactgagccagctgcagacggagctcctggcggccctgctcgagtcagggctgagcaaagaggcactgatccaggcactgggtgagccggggccctacctcctggctggagaaggccccctggacaagggggagtcctgcggcggcggtcgaggggagctggctgagctgcccaatgggctgggggagactcggggctccgaggacgagacggacgacgatggggaagacttcacgccacccatcctcaaagagctggagaacctcagccctgaggaggcggcccaccagaaagccgtggtggagacccttctgcaggaggacccgtggcgtgtggcgaagatggtcaagtcctacctgcagcagcacaacatcccacagcgggaggtggtcgataccactggcctcaaccagtcccacctgtcccaacacctcaacaagggcactcccatgaagacgcagaagcgggccgccctgtacacctggtacgtccgcaagcagcgagaggtggcgcagcagttcacccatgcagggcagggagggctgattgaagagcccacaggtgatgagctaccaaccaagaaggggcggaggaaccgtttcaagtggggcccagcatcccagcagatcctgttccaggcctatgagaggcagaagaaccctagcaaggaggagcgagagacgctagtggaggagtgcaatagggcggaatgcatccagagaggggtgtccccatcacaggcacaggggctgggctccaacctcgtcacggaggtgcgtgtctacaactggtttgccaaccggcgcaaagaagaagccttccggcacaagctggccatggacacgtacagcgggccccccccagggccaggcccgggacctgcgctgcccgctcacagctcccctggcctgcctccacctgccctctcccccagtaaggtccacggtgtgcgctatggacagcctgcgaccagtgagactgcagaagtaccctcaagcagcggcggtcccttagtgacagtgtctacacccctccaccaagtgtcccccacgggcctggagcccagccacagcctgctgagtacagaagccaagctggtctcagcagctgggggccccctcccccctgtcagcaccctgacagcactgcacagcttggagcagacatccccaggcctcaaccagcagccccagaacctcatcatggcctcacttcctggggtcatgaccatcgggcctggtgagcctgcctccctgggtcctacgttcaccaacacaggtgcctccaccctggtcatcggcctggcctccacgcaggcacagagtgtgccggtcatcaacagcatgggcagcagcctgaccaccctgcagcccgtccagttctcccagccgctgcacccctcctaccagcagccgctcatgccacctgtgcagagccatgtgacccagagccccttcatggccaccatggctcagctgcagagcccccacgccctctacagccacaagcccgaggtggcccagtacacccacacgggcctgctcccgcagactatgctcatcaccgacaccaccaacctgagcgccctggccagcctcacgcccaccaagcaggtcttcacctcagacactgaggcctccagtgagtccgggcttcacacgccggcatctcaggccaccaccctccacgtccccagccaggaccctgccagcatccagcacctgcagccggcccaccggctcagcgccagccccacagtgtcctccagcagcctggtgctgtaccagagctcagactccagcaatggccagagccacctgctgccatccaaccacagcgtcatcgagaccttcatctccacccagatggcctcttcctcccagtaaccacggcacctgggccctggggcctgtactgcctgcttggggggtgatgagggcagcagccagccctgcctggaggacctgagcctgccgagcaaccgtggcccttcctggacagctgtgcctcgctccccactctgctctgatgcatcagaaagggagggctctgaggcgccccaacccgtggaggctgctcggggtgcacaggagggggtcgtggagagctaggagcaaagcctgttcatggcagatgtaggagggactgtcgctgcttcgtgggatacagtcttcttacttggaactgaagggggcggcctatgacttgggcacccccagcctgggcctatggagagccctgggaccgctacaccactctggcagccacacttctcaggacacaggcctgtgtagctgtgacctgctgagctctgagaggccctggatcagcgtggccttgttctgtcaccaatgtacccaccgggccactccttcctgccccaactccttccagctagtgacccacatgccatttgtactgaccccatcacctactcacacaggcatttcctgggtggctactctgtgccagagcctggggctctaacgcctgagcccagggaggccgaagctaacagggaaggcaggcagggctctcctggcttcccatccccagcgattccctctcccaggccccatgacctccagctttcctgtatttgttcccaagagcatcatgcctctgaggccagcctggcctcctgcctctactgggaaggctacttcggggctgggaagtcgtccttactcctgtgggagcctcgcaacccgtgccaagtccaggtcctggtggggcagctcctctgtctcgagcgccctgcagaccctgcccttgtttggggcaggagtagctgagctcacaaggcagcaaggcccgagcagctgagcagggccggggaactggccaagctgaggtgcccaggagaagaaagaggtgaccccagggcacaggagctacctgtgtggacaggactaacactcagaagcctgggggcctggctggctgagggcagttcgcagccaccctgaggagtctgaggtcctgagcactgccaggagggacaaaggagcctgtgaacccaggacaagcatggtcccacatccctgggcctgctgctgagaacctggccttcagtgtaccgcgtctaccctgggattcaggaaaaggcctggggtgacccggcaccccctgcagcttgtagccagccggggcgagtggcacgtttatttaacttttagtaaagtcaaggagaaatgcggtgg

SEQ ID NO: 17 - DNA, 2621 bp, Homo sapiens
acttgtcatggcgactgtccagctttgtgccaggagcctcgcaggggttgatgggattggggttttcccctcccatgtgctcaagactggcgctaaaagttttgagcttctcaaaagtctagagccaccgtccagggagcaggtagctgctgggctccggggacactttgcgttcgggctgggagcgtgctttccacgacggtgacacgcttccctggattggcagccagactgccttccgggtcactgccatggaggagccgcagtcagatcctagcgtcgagccccctctgagtcaggaaacattttcagacctatggaaactacttcctgaaaacaacgttctgtcccccttgccgtcccaagcaatggatgatttgatgctgtccccggacgatattgaacaatggttcactgaagacccaggtccagatgaagctcccagaatgccagaggctgctccccccgtggcccctgcaccagcagctcctacaccggcggcccctgcaccagccccctcctggcccctgtcatcttctgtcccttcccagaaaacctaccagggcagctacggtttccgtctgggcttcttgcattctgggacagccaagtctgtgacttgcacgtactcccctgccctcaacaagatgttttgccaactggccaagacctgccctgtgcagctgtgggttgattccacacccccgcccggcacccgcgtccgcgccatggccatctacaagcagtcacagcacatgacggaggttgtgaggcgctgcccccaccatgagcgctgctcagatagcgatggtctggcccctcctcagcatcttatccgagtggaaggaaatttgcgtgtggagtatttggatgacagaaacacttttcgacatagtgtggtggtgccctatgagccgcctgaggttggctctgactgtaccaccatccactacaactacatgtgtaacagttcctgcatgggcggcatgaaccggaggcccatcctcaccatcatcacactggaagactccagtggtaatctactgggacggaacagctttgaggtgcgtgtttgtgcctgtcctgggagagaccggcgcacagaggaagagaatctccgcaagaaaggggagcctcaccacgagctgcccccagggagcactaagcgagcactgcccaacaacaccagctcctctccccagccaaagaagaaaccactggatggagaatatttcacccttcagatccgtgggcgtgagcgcttcgagatgttccgagagctgaatgaggccttggaactcaaggatgcccaggctgggaaggagccaggggggagcagggctcactccagccacctgaagtccaaaaagggtcagtctacctcccgccataaaaaactcatgttcaagacagaagggcctgactcagactgacattctccacttcttgttccccactgacagcctcccacccccatctctccctcccctgccattttgggttttgggtctttgaacccttgcttgcaataggtgtgcgtcagaagcacccaggacttccatttgctttgtcccggggctccactgaacaagttggcctgcactggtgttttgttgtggggaggaggatggggagtaggacataccagcttagattttaaggtttttactgtgagggatgtttgggagatgtaagaaatgttcttgcagttaagggttagtttacaatcagccacattctaggtaggggcccacttcaccgtactaaccagggaagctgtccctcactgttgaattttctctaacttcaaggcccatatctgtgaaatgctggcatttgcacctacctcacagagtgcattgtgagggttaatgaaataatgtacatctggccttgaaaccaccttttattacatggggtctagaacttgacccccttgagggtgcttgttccctctccctgttggtcggtgggttggtagtttctacagttgggcagctggttaggtagagggagttgtcaagtctctgctggcccagccaaaccctgtctgacaacctcttggtgaaccttagtacctaaaaggaaatctcaccccatcccacaccctggaggatttcatctcttgtatatgatgatctggatccaccaagacttgttttatgctcagggtcaatttcttttttcttttttttttttttttttctttttctttgagactgggtctcgctttgttgcccaggctggagtggagtggcgtgatcttggcttactgcagcctttgcctccccggctcgagcagtcctgcctcagcctccggagtagctgggaccacaggttcatgccaccatggccagccaacttttgcatgttttgtagagatggggtctcacagtgttgcccaggctggtctcaaactcctgggctcaggcgatccacctgtctcagcctcccagagtgctgggattacaattgtgagccaccacgtccagctggaagggtcaacatcttttacattctgcaagcacatctgcattttcaccccacccttcccctccttctccctttttatatcccatttttatatcgatctcttattttacaataaaactttgctgcca

SEQ ID NO: 18 - DNA, 4400 bp, Homo sapiens
cctcctccacagtggtgaggtcacagccccttggagccctccctcttcccacccctcccgctcccgggtctcctttggcctggggtaacccgaggtgcagagctgagaatgaggcgatttcggaggatggagaaatagccccgagtcccgtggaaaatgaggccggcggacttgctgcagctggtgctgctgctcgacctgcccagggacctgggcggaatggggtgttcgtctccaccctgcgagtgccatcaggaggaggacttcagagtcacctgcaaggatattcaacgcatccccagcttaccgcccagtacgcagactctgaagcttattgagactcacctgagaactattccaagtcatgcattttctaatctgcccaatatttccagaatctacgtatctatagatgtgactctgcagcagctggaatcacactccttctacaatttgagtaaagtgactcacatagaaattcggaataccaggaacttaacttacatagaccctgatgccctcaaagagctccccctcctaaagttccttggcattttcaacactggacttaaaatgttccctgacctgaccaaagtttattccactgatatattctttatacttgaaattacagacaacccttacatgacgtcaatccctgtgaatgcttttcagggactatgcaatgaaaccttgacactgaagctgtacaacaatggctttacttcagtccaaggatatgctttcaatgggacaaagctggatgctgtttacctaaacaagaataaatacctgacagttattgacaaagatgcatttggaggagtatacagtggaccaagcttgctggacgtgtctcaaaccagtgtcactgcccttccatccaaaggcctggagcacctgaaggaactgatagcaagaaacacctggactcttaagaaacttccactttccttgagtttccttcacctcacacgggctgacctttcttacccaagccactgctgtgcttttaagaatcagaagaaaatcagaggaatccttgagtccttgatgtgtaatgagagcagtatgcagagcttgcgccagagaaaatctgtgaatgccttgaatagccccctccaccaggaatatgaagagaatctgggtgacagcattgttgggtacaaggaaaagtccaagttccaggatactcataacaacgctcattattacgtcttctttgaagaacaagaggatgagatcattggttttggccaggagctcaaaaacccccaggaagagactctacaagcttttgacagccattatgactacaccatatgtggggacagtgaagacatggtgtgtacccccaagtccgatgagttcaacccgtgtgaagacataatgggctacaagttcctgagaattgtggtgtggttcgttagtctgctggctctcctgggcaatgtctttgtcctgcttattctcctcaccagccactacaaactgaacgtcccccgctttctcatgtgcaacctggcctttgcggatttctgcatggggatgtacctgctcctcatcgcctctgtagacctctacactcactctgagtactacaaccatgccatcgactggcagacaggccctgggtgcaacacggctggtttcttcactgtctttgcaagcgagttatcggtgtatacgctgacggtcatcaccctggagcgctggtatgccatcaccttcgccatgcgcctggaccggaagatccgcctcaggcacgcatgtgccatcatggttgggggctgggtttgctgcttccttctcgccctgcttcctttggtgggaataagtagctatgccaaagtcagtatctgcctgcccatggacaccgagacccctcttgctctggcatatattgtttttgttctgacgctcaacatagttgccttcgtcatcgtctgctgctgttatgtgaagatctacatcacagtccgaaatccgcagtacaacccaggggacaaagataccaaaattgccaagaggatggctgtgttgatcttcaccgacttcatatgcatggccccaatctcattctatgctctgtcagcaattctgaacaagcctctcatcactgttagcaactccaaaatcttgctggtactcttctatccacttaactcctgtgccaatccattcctctatgctattttcaccaaggccttccagagggatgtgttcatcctactcagcaagtttggcatctgtaaacgccaggctcaggcataccgggggcagagggttcctccaaagaacagcactgatattcaggttcaaaaggttacccacgagatgaggcagggtctccacaacatggaagatgtctatgaactgattgaaaactcccatctaaccccaaagaagcaaggccaaatctcagaagagtatatgcaaacggttttgtaagttaacactacactactcacaatggtaggggaacttacaaaataatagtttcttgaatatgcattccaatcccatgacacccccaacacatagctgccctcactcttgtgcaggcgatgtttcaatgtttcatggggcaagagtttatctctggagagtgattagtattaacctaatcattgcccccaagaaggaagttaggctaccagcatatttgaatgccaggtgaaatcaaaataatctacactatctagaagactttcttgatgccaagtccagagatgtcattgtgtaggatgttcagtaaatattaactgagctatgtcaatatagagcttctcagttttgtataacatttcatactaaagattcagcaaatggaaaatgctattaatttggttggtgaccacaagataaaatcagtcccacgttggctcagttcaactagatgttccctgatacaaagagaacttgatttccttaaaactgaaaagccaaacacagctagctgtcatacaagaaacagctattatgagacatgaaggagggtaagaattagctttaagttttgttttgctttgttttgttttttaactcaacctattaatcatctcttcacaagaatccacctgatgtgaccaagctattatgtgttgcctggaaaaactggcaagatttcagcttatgtggcctagcaaactaagaattgctcttcttggccagcctcatagcataaaagatgtgaactctaggaagtctttctgagtagcaataagtgggaattatgggcagagcacactcaatcccctgttgattaataaaacaggctggacactaattaactatgggacttaaatctgtagaaatgaaggagtccaatagcttcttccaattttaaaactctagtacatccctttccctcaaatatatatttctaagataaagagaaagaagagcactaagtaagtagaatctgtttttcctattttgtagggctgctgactcctagtccttgaagcctagacacatgacccaggaaatttttcctttgtttcacttttgattatgatgtctgagccaaaaattcaattaagtaaacatactcgcctggatctgaatcattcatttaattactagatctacccagctgttatatcaggccaaaaacagattcgtgtttatataaaagagtaaacgatggttgcaaattttggctatttagagttgctacttcactatgaagagtcacttcaaaacacttcgcttgtctttagggatgatttttgccatttccagtccacggtatgatactaaagctgtcaagagaggtttcttcttttctgaaactgccagctctttccagccctgttgatcactggacataaagcttcttttccccaataattcttctttacttaaaatagtcaggatctttatctacagatgtactctccaggttacctgtgatgatagccccctaatgtcctgctagaaaagtctccaagcagagatgacattacttctgaatgctcataaaccacaccatgaaataaaagctctttgttgttttaagattgtgaagtgtcgttaatgggtccccacagatggtccctgctggactcacctggaatctctccacagccatacccactcatcactatcattgagacctgcacatcttaatagaaatattataaacatcgaaaatcatgacttacctagaagttcgcttgtaactaatgaaattaaacaaatgtgttgccttttgtcatgtgtttctctcctgtgacatttcaaaatatcacatcttgataaataatgtgtttcatcttgaatagctgaactaattgctttggaaacagagtcctagaaaagtgacttcaacagaattgttactaaaatttgcactcacaacatgaaataaattttcttcctatggaataatcgtg

SEQ ID NO: 19 - DNA, 1715 bp, Homo sapiens
gaattccagcggcggcgccgttgccgctgccgggaaacacaaggaaagggaaccagcgcagcgtggcgatgggcgggggtagagccccgccggagaggctgggcggctgccggtgacagactgtgccctgtccacggtgcctcctgcatgtcctgctgccctgagctgtcccgagctaggtgacagcgtaccacgctgccaccatgaatgaggtgtctgtcatcaaagaaggctggctccacaagcgtggtgaatacatcaagacctggaggccacggtacttcctgctgaagagcgacggctccttcattgggtacaaggagaggcccgaggcccctgatcagactctaccccccttaaacaacttctccgtagcagaatgccagctgatgaagaccgagaggccgcgacccaacacctttgtcatacgctgcctgcagtggaccacagtcatcgagaggaccttccacgtggattctccagacgagagggaggagtggatgcgggccatccagatggtcgccaacagcctcaagcagcgggccccaggcgaggaccccatggactacaagtgtggctcccccagtgactcctccacgactgaggagatggaagtggcggtcagcaaggcacgggctaaagtgaccatgaatgacttcgactatctcaaactccttggcaagggaacctttggcaaagtcatcctggtgcgggagaaggccactggccgctactacgccatgaagatcctgcgaaaggaagtcatcattgccaaggatgaagtcgctcacacagtcaccgagagccgggtcctccagaacaccaggcacccgttcctcactgcgctgaagtatgccttccagacccacgaccgcctgtgctttgtgatggagtatgccaacgggggtgagctgttcttccacctgtcccgggagcgtgtcttcacagaggagcgggcccggttttatggtgcagagattgtctcggctcttgagtacttgcactcgcgggacgtggtataccgcgacatcaagctggaaaacctcatgctggacaaagatggccacatcaagatcactgactttggcctctgcaaagagggcatcagtgacggggccaccatgaaaaccttctgtgggaccccggagtacctggcgcctgaggtgctggaggacaatgactatggccgggccgtggactggtgggggctgggtgtggtcatgtacgagatgatgtgcggccgcctgcccttctacaaccaggaccacgagcgcctcttcgagctcatcctcatggaagagatccgcttcccgcgcacgctcagccccgaggccaagtccctgcttgctgggctgcttaagaaggaccccaagcagaggcttggtggggggcccagcgatgccaaggaggtcatggagcacaggttcttcctcagcatcaactggcaggacgtggtccagaagaagctcctgccacccttcaaacctcaggtcacgtccgaggtcgacacaaggtacttcgatgatgaatttaccgcccagtccatcacaatcacaccccctgaccgctatgacagcctgggcttactggagctggaccagcggacccacttcccccagttctcctactcggccagcatccgcgagtgagcagtctgcccacgcagaggacgcacgctcgctgccatcaccgctgggtggttttttacccctgcc

SEQ ID NO: 20 - DNA, 1327 bp, Homo sapiens
cacaacggccatcaccacctctccgcaccctctgtctccttccttctcgggcctcacccctggccctcgctttcagtgcccagcccggaccgcagcactccagttccgccccaacccgggaaccctggactgaggctcccgtttctgtcctttctattgggcgcacttccgatggcgtcaggaatttcagccaataggagccagccaggaagtacctctctgagcggttggtgccgggtataaaagaaggccagcacggctgctcacgacgccgcgaagcctgtgtagcactgagacatcagtgagttggctacagcagaccaaacagcccagcagcccagcagcccacgcatgcggcgcctcacagtcgatgactttgaaatcgggcgtcccctgggcaaggggaaatttgggaatgtgtacctggctcggctcaaggaaagccatttcattgtggccctgaaggttctcttcaagtcgcagatagagaaggaaggactggagcaccagctgcgccgggaaattgagatccaggctcatctacaacaccccaatatcctgcgcctgtataactatttccatgatgcacgccgggtgtacctgattctggaatatgctccaaggggtgagctctacaaggagctgcagaaaagcgagaaattagatgaacagcgcacagccacgataatagaggaagttgcagatgccctgacctactgccatgacaagaaagtgattcacagagatattaagccagagaacctgctgctggggttcaggggtgaggtgaagattgcagattttggctggtctgtgcacacccccctccctgagaggaagacaatgtgtgggacactggactacttgccgccagaaatgattgaggggagaacatatgatgaaaaggtggatttgtggtgcattggagtgctctgctatgagctgctggtgggatatccaccctttgagagcgcctcccacagtgagacttacagacgcatcctcaaggtagatgtgaggtttccactatcaatgcctctgggggcccgggacttgatttccaggcttctcagataccagcccttggagagactgcccctggcccagatcctgaagcacccctgggttcaggcccactcccgaagggtgctgcctccctgtgctcagatggcttcctgagccctgtctgcctctgttccctttgtgtgtgttcagggagctctcctgctctgccacctcatttgtctttatttttttctcttttaagatgtaagatgctaattaataaaagctgaatcatttcataccaaaaaaaaaaaaaaaaaaa

SEQ ID NO: 21 - DNA, 2575 bp, Homo sapiens
ggaggaggaagcaagcgagggggctggttcctgagcttcgcaattcctgtgtcgccttctgggctcccagcctgccgggtcgcatgatccctccggccggagctggtttttttgccagccaccgcgaggccggctgagttaccggcatccccgcagccacctcctctcccgacctgtgatacaaaagatcttccgggggctgcacctgcctgcctttgcctaaggcggatttgaatctctttctctcccttcagaatcttatcttggctttggatcttagaagagaatcactaaccagagacgagactcagtgagtgagcaggtgttttggacaatggactggttgagcccatccctattataaaaatgtctcagagcaaccgggagctggtggttgactttctctcctacaagctttcccagaaaggatacagctggagtcagtttagtgatgtggaagagaacaggactgaggccccagaagggactgaatcggagatggagacccccagtgccatcaatggcaacccatcctggcacctggcagacagccccgcggtgaatggagccactggccacagcagcagtttggatgcccgggaggtgatccccatggcagcagtaaagcaagcgctgagggaggcaggcgacgagtttgaactgcggtaccggcgggcattcagtgacctgacatcccagctccacatcaccccagggacagcatatcagagctttgaacaggtagtgaatgaactcttccgggatggggtaaactggggtcgcattgtggcctttttctccttcggcggggcactgtgcgtggaaagcgtagacaaggagatgcaggtattggtgagtcggatcgcagcttggatggccacttacctgaatgaccacctagagccttggatccaggagaacggcggctgggatacttttgtggaactctatgggaacaatgcagcagccgagagccgaaagggccaggaacgcttcaaccgctggttcctgacgggcatgactgtggccggcgtggttctgctgggctcactcttcagtcggaaatgaccagacactgaccatccactctaccctcccacccccttctctgctccaccacatcctccgtccagccgccattgccaccaggagaaccactacatgcagcccatgcccacctgcccatcacagggttgggcccagatctggtcccttgcagctagttttctagaatttatcacacttctgtgagacccccacacctcagttcccttggcctcagaattcacaaaatttccacaaaatctgtccaaaggaggctggcaggtatggaagggtttgtggctgggggcaggagggccctacctgattggtgcaacccttaccccttagcctccctgaaaatgtttttctgccagggagcttgaaagttttcagaacctcttccccagaaaggagactagattgcctttgttttgatgtttgtggcctcagaattgatcattttccccccactctccccacactaacctgggttccctttccttccatccctaccccctaagagccatttaggggccacttttgactagggattcaggctgcttgggataaagatgcaaggaccaggactccctcctcacctctggactggctagagtcctcactcccagtccaaatgtcctccagaagcctctggctagaggccagccccacccaggagggagggggctatagctacaggaagcaccccatgccaaagctagggtggcccttgcagttcagcaccaccctagtcccttcccctccctggctcccatgaccatactgagggaccaactgggcccaagacagatgccccagagctgtttatggcctcagctgcctcacttcctacaagagcagcctgtggcatctttgccttgggctgctcctcatggtgggttcaggggactcagccctgaggtgaaagggagctatcaggaacagctatgggagccccagggtcttccctacctcaggcaggaagggcaggaaggagagcctgctgcatggggtggggtagggctgactagaagggccagtcctgcctggccaggcagatctgtgccccatgcctgtccagcctgggcagccaggctgccaaggccagagtggcctggccaggagctcttcaggcctccctctctcttctgctccacccttggcctgtctcatccccaggggtcccagccaccccgggctctctgctgtacatatttgagactagtttttattccttgtgaagatgatatactatttttgttaagcgtgtctgtatttatgtgtgaggagctgctggcttgcagtgcgcgtgcacgtggagagctggtgcccggagattggacggcctgatgctccctcccctgccctggtccagggaagctggccgagggtcctggctcctgaggggcatctgcccctcccccaacccccaccccacacttgttccagctctttgaaatagtctgtgtgaaggtgaaagtgcagttcagtaataaactgtgtttactcagtgaaaaaaaaaaaaaaaaaa

SEQ ID NO: 22 - DNA, 1154 bp, Homo sapiens
cgctcagggaaggcgggtgcgcgcctgcggggcggagatgggcagggggcggtgcgtgggtcccagtctgcagttaagggggcaggagtggcgctgctcacctctggtgccaaagggcggcgcagcggctgccgagctcggccctggaggcggcgagaacatggtgcgcaggttcttggtgaccctccggattcggcgcgcgtgcggcccgccgcgagtgagggttttcgtggttcacatcccgcggctcacgggggagtgggcagcgccaggggcgcccgccgctgtggccctcgtgctgatgctactgaggagccagcgtctagggcagcagccgcttcctagaagaccaggtcatgatgatgggcagcgcccgagtggcggagctgctgctgctccacggcgcggagcccaactgcgccgaccccgccactctcacccgacccgtgcacgacgctgcccgggagggcttcctggacacgctggtggtgctgcaccgggccggggcgcggctggacgtgcgcgatgcctggggccgtctgcccgtggacctggctgaggagctgggccatcgcgatgtcgcacggtacctgcgcgcggctgcggggggcaccagaggcagtaaccatgcccgcatagatgccgcggaaggtccctcagacatccccgattgaaagaaccagagaggctctgagaaacctcgggaaacttagatcatcagtcaccgaaggtcctacagggccacaactgcccccgccacaacccaccccgctttcgtagttttcatttagaaaatagagcttttaaaaatgtcctgccttttaacgtagatatatgccttcccccactaccgtaaatgtccatttatatcattttttatatattcttataaaaatgtaaaaaagaaaaacaccgcttctgccttttcactgtgttggagttttctggagtgagcactcacgccctaagcgcacattcatgtgggcatttcttgcgagcctcgcagcctccggaagctgtcgacttcatgacaagcattttgtgaactagggaagctcaggggggttactggcttctcttgagtcacactgctagcaaatggcagaaccaaagctcaaataaaaataaaataattttcattcattcactcaaaa

SEQ ID NO: 23 - DNA, 5511 bp, Homo sapiens
acacacacacacccctcccctgccatccctccccggactccggctccggctccgattgcaatttgcaacctccgctgccgtcgccgcagcagccaccaattcgccagcggttcaggtggctcttgcctcgatgtcctagcctaggggcccccgggccggacttggctgggctcccttcaccctctgcggagtcatgagggcgaacgacgctctgcaggtgctgggcttgcttttcagcctggcccggggctccgaggtgggcaactctcaggcagtgtgtcctgggactctgaatggcctgagtgtgaccggcgatgctgagaaccaataccagacactgtacaagctctacgagaggtgtgaggtggtgatggggaaccttgagattgtgctcacgggacacaatgccgacctctccttcctgcagtggattcgagaagtgacaggctatgtcctcgtggccatgaatgaattctctactctaccattgcccaacctccgcgtggtgcgagggacccaggtctacgatgggaagtttgccatcttcgtcatgttgaactataacaccaactccagccacgctctgcgccagctccgcttgactcagctcaccgagattctgtcagggggtgtttatattgagaagaacgataagctttgtcacatggacacaattgactggagggacatcgtgagggaccgagatgctgagatagtggtgaaggacaatggcagaagctgtcccccctgtcatgaggtttgcaaggggcgatgctggggtcctggatcagaagactgccagacattgaccaagaccatctgtgctcctcagtgtaatggtcactgctttgggcccaaccccaaccagtgctgccatgatgagtgtgccgggggctgctcaggccctcaggacacagactgctttgcctgccggcacttcaatgacagtggagcctgtgtacctcgctgtccacagcctcttgtctacaacaagctaactttccagctggaacccaatccccacaccaagtatcagtatggaggagtttgtgtagccagctgtccccataactttgtggtggatcaaacatcctgtgtcagggcctgtcctcctgacaagatggaagtagataaaaatgggctcaagatgtgtgagccttgtgggggactatgtcccaaagcctgtgagggaacaggctctgggagccgcttccagactgtggactcgagcaacattgatggatttgtgaactgcaccaagatcctgggcaacctggactttctgatcaccggcctcaatggagacccctggcacaagatccctgccctggacccagagaagctcaatgtcttccggacagtacgggagatcacaggttacctgaacatccagtcctggccgccccacatgcacaacttcagtgttttttccaatttgacaaccattggaggcagaagcctctacaaccggggcttctcattgttgatcatgaagaacttgaatgtcacatctctgggcttccgatccctgaaggaaattagtgctgggcgtatctatataagtgccaataggcagctctgctaccaccactctttgaactggaccaaggtgcttcgggggcctacggaagagcgactagacatcaagcataatcggccgcgcagagactgcgtggcagagggcaaagtgtgtgacccactgtgctcctctgggggatgctggggcccaggccctggtcagtgcttgtcctgtcgaaattatagccgaggaggtgtctgtgtgacccactgcaactttctgaatggggagcctcgagaatttgcccatgaggccgaatgcttctcctgccacccggaatgccaacccatggagggcactgccacatgcaatggctcgggctctgatacttgtgctcaatgtgcccattttcgagatgggccccactgtgtgagcagctgcccccatggagtcctaggtgccaagggcccaatctacaagtacccagatgttcagaatgaatgtcggccctgccatgagaactgcacccaggggtgtaaaggaccagagcttcaagactgtttaggacaaacactggtgctgatcggcaaaacccatctgacaatggctttgacagtgatagcaggattggtagtgattttcatgatgctgggcggcacttttctctactggcgtgggcgccggattcagaataaaagggctatgaggcgatacttggaacggggtgagagcatagagcctctggaccccagtgagaaggctaacaaagtcttggccagaatcttcaaagagacagagctaaggaagcttaaagtgcttggctcgggtgtctttggaactgtgcacaaaggagtgtggatccctgagggtgaatcaatcaagattccagtctgcattaaagtcattgaggacaagagtggacggcagagttttcaagctgtgacagatcatatgctggccattggcagcctggaccatgcccacattgtaaggctgctgggactatgcccagggtcatctctgcagcttgtcactcaatatttgcctctgggttctctgctggatcatgtgagacaacaccggggggcactggggccacagctgctgctcaactggggagtacaaattgccaagggaatgtactaccttgaggaacatggtatggtgcatagaaacctggctgcccgaaacgtgctactcaagtcacccagtcaggttcaggtggcagattttggtgtggctgacctgctgcctcctgatgataagcagctgctatacagtgaggccaagactccaattaagtggatggcccttgagagtatccactttgggaaatacacacaccagagtgatgtctggagctatggtgtgacagtttgggagttgatgaccttcggggcagagccctatgcagggctacgattggctgaagtaccagacctgctagagaagggggagcggttggcacagccccagatctgcacaattgatgtctacatggtgatggtcaagtgttggatgattgatgagaacattcgcccaacctttaaagaactagccaatgagttcaccaggatggcccgagacccaccacggtatctggtcataaagagagagagtgggcctggaatagcccctgggccagagccccatggtctgacaaacaagaagctagaggaagtagagctggagccagaactagacctagacctagacttggaagcagaggaggacaacctggcaaccaccacactgggctccgccctcagcctaccagttggaacacttaatcggccacgtgggagccagagccttttaagtccatcatctggatacatgcccatgaaccagggtaatcttggggagtcttgccaggagtctgcagtttctgggagcagtgaacggtgcccccgtccagtctctctacacccaatgccacggggatgcctggcatcagagtcatcagaggggcatgtaacaggctctgaggctgagctccaggagaaagtgtcaatgtgtaggagccggagcaggagccggagcccacggccacgcggagatagcgcctaccattcccagcgccacagtctgctgactcctgttaccccactctccccacccgggttagaggaagaggatgtcaacggttatgtcatgccagatacacacctcaaaggtactccctcctcccgggaaggcaccctttcttcagtgggtctcagttctgtcctgggtactgaagaagaagatgaagatgaggagtatgaatacatgaaccggaggagaaggcacagtccacctcatccccctaggccaagttcccttgaggagctgggttatgagtacatggatgtggggtcagacctcagtgcctctctgggcagcacacagagttgcccactccaccctgtacccatcatgcccactgcaggcacaactccagatgaagactatgaatatatgaatcggcaacgagatggaggtggtcctgggggtgattatgcagccatgggggcctgcccagcatctgagcaagggtatgaagagatgagagcttttcaggggcctggacatcaggccccccatgtccattatgcccgcctaaaaactctacgtagcttagaggctacagactctgcctttgataaccctgattactggcatagcaggcttttccccaaggctaatgcccagagaacgtaactcctgctccctgtggcactcagggagcatttaatggcagctagtgcctttagagggtaccgtcttctccctattccctctctctcccaggtcccagccccttttccccagtcccagacaattccattcaatctttggaggcttttaaacattttgacacaaaattcttatggtatgtagccagctgtgcactttcttctctttcccaaccccaggaaaggttttccttattttgtgtgctttcccagtcccattcctcagcttcttcacaggcactcctggagatatgaaggattactctccatatcccttcctctcaggctcttgactacttggaactaggctcttatgtgtgcctttgtttcccatcagactgtcaagaagaggaaagggaggaaacctagcagaggaaagtgtaattttggtttatgactcttaaccccctagaaagacagaagcttaaaatctgtgaagaaagaggttaggagtagatattgattactatcataattcagcacttaactatgagccaggcatcatactaaacttcacctacattatctcacttagtcctttatcatccttaaaacaattctgtgacatacatattatctcattttacacaaagggaagtcgggcatggtggctcatgcctgtaatctcagcactttgggaggctgaggcagaaggattacctgaggcaaggagtttgagaccagcttagccaacatagtaagacccccatctctttaaaaaaaaaaaaaaaaaaaaaaaaaaaactttagaactgggtgcagtggctcatgcctgtaatcccagccagcactttgggaggctgagatgggaagatcacttgagcccagaattagagataagcctatggaaacatagcaagacactgtctctacaggggaaaaaaaaaaaagaaactgagccttaaagagatgaaataaattaagcagtagatccaggatgcaaaatcctcccaattcctgtgcatgtgctcttattgtaaggtgccaagaaaaactgatttaagttacagcccttgtttaaggggcactgtttcttgtttttgcactgaatcaagtctaaccccaacagccacatcctcctatacctagacatctcatctcaggaagtggtggtgggggtagtcagaaggaaaaataactggacatctttgtgtaaaccataatccacatgtgccgtaaatgatcttcactccttatccgagggcaaattcacaaggatccccaagatccacttttagaagccattctcatcca

SEQ ID NO: 24 - DNA, 5484 bp, Homo sapiens
aattgtcagcacgggatctgagacttccaaaaaatgaagccggcgacaggactttgggtctgggtgagccttctcgtggcggcggggaccgtccagcccagcgattctcagtcagtgtgtgcaggaacggagaataaactgagctctctctctgacctggaacagcagtaccgagccttgcgcaagtactatgaaaactgtgaggttgtcatgggcaacctggagataaccagcattgagcacaaccgggacctctccttcctgcggtctgttcgagaagtcacaggctacgtgttagtggctcttaatcagtttcgttacctgcctctggagaatttacgcattattcgtgggacaaaactttatgaggatcgatatgccttggcaatatttttaaactacagaaaagatggaaactttggacttcaagaacttggattaaagaacttgacagaaatcctaaatggtggagtctatgtagaccagaacaaattcctttgttatgcagacaccattcattggcaagatattgttcggaacccatggccttccaacttgactcttgtgtcaacaaatggtagttcaggatgtggacgttgccataagtcctgtactggccgttgctggggacccacagaaaatcattgccagactttgacaaggacggtgtgtgcagaacaatgtgacggcagatgctacggaccttacgtcagtgactgctgccatcgagaatgtgctggaggctgctcaggacctaaggacacagactgctttgcctgcatgaatttcaatgacagtggagcatgtgttactcagtgtccccaaacctttgtctacaatccaaccacctttcaactggagcacaatttcaatgcaaagtacacatatggagcattctgtgtcaagaaatgtccacataactttgtggtagattccagttcttgtgtgcgtgcctgccctagttccaagatggaagtagaagaaaatgggattaaaatgtgtaaaccttgcactgacatttgcccaaaagcttgtgatggcattggcacaggatcattgatgtcagctcagactgtggattccagtaacattgacaaattcataaactgtaccaagatcaatgggaatttgatctttctagtcactggtattcatggggacccttacaatgcaattgaagccatagacccagagaaactgaacgtctttcggacagtcagagagataacaggtttcctgaacatacagtcatggccaccaaacatgactgacttcagtgttttttctaacctggtgaccattggtggaagagtactctatagtggcctgtccttgcttatcctcaagcaacagggcatcacctctctacagttccagtccctgaaggaaatcagcgcaggaaacatctatattactgacaacagcaacctgtgttattatcataccattaactggacaacactcttcagcacaatcaaccagagaatagtaatccgggacaacagaaaagctgaaaattgtactgctgaaggaatggtgtgcaaccatctgtgttccagtgatggctgttggggacctgggccagaccaatgtctgtcgtgtcgccgcttcagtagaggaaggatctgcatagagtcttgtaacctctatgatggtgaatttcgggagtttgagaatggctccatctgtgtggagtgtgacccccagtgtgagaagatggaagatggcctcctcacatgccatggaccgggtcctgacaactgtacaaagtgctctcattttaaagatggcccaaactgtgtggaaaaatgtccagatggcttacagggggcaaacagtttcattttcaagtatgctgatccagatcgggagtgccacccatgccatccaaactgcacccaagggtgtaacggtcccactagtcatgactgcatttactacccatggacgggccattccactttaccacaacatgctagaactcccctgattgcagctggagtaattggtgggctcttcattctggtcattgtgggtctgacatttgctgtttatgttagaaggaagagcatcaaaaagaaaagagccttgagaagattcttggaaacagagttggtggaaccattaactcccagtggcacagcacccaatcaagctcaacttcgtattttgaaagaaactgagctgaagagggtaaaagtccttggctcaggtgcttttggaacggtttataaaggtatttgggtacctgaaggagaaactgtgaagattcctgtggctattaagattcttaatgagacaactggtcccaaggcaaatgtggagttcatggatgaagctctgatcatggcaagtatggatcatccacacctagtccggttgctgggtgtgtgtctgagcccaaccatccagctggttactcaacttatgccccatggctgcctgttggagtatgtccacgagcacaaggataacattggatcacaactgctgcttaactggtgtgtccagatagctaagggaatgatgtacctggaagaaagacgactcgttcatcgggatttggcagcccgtaatgtcttagtgaaatctccaaaccatgtgaaaatcacagattttgggctagccagactcttggaaggagatgaaaaagagtacaatgctgatggaggaaagatgccaattaaatggatggctctggagtgtatacattacaggaaattcacccatcagagtgacgtttggagctatggagttactatatgggaactgatgacctttggaggaaaaccctatgatggaattccaacgcgagaaatccctgatttattagagaaaggagaacgtttgcctcagcctcccatctgcactattgacgtttacatggtcatggtcaaatgttggatgattgatgctgacagtagacctaaatttaaggaactggctgctgagttttcaaggatggctcgagaccctcaaagatacctagttattcagggtgatgatcgtatgaagcttcccagtccaaatgacagcaagttctttcagaatctcttggatgaagaggatttggaagatatgatggatgctgaggagtacttggtccctcaggctttcaacatcccacctcccatctatacttccagagcaagaattgactcgaataggagtgaaattggacacagccctcctcctgcctacacccccatgtcaggaaaccagtttgtataccgagatggaggttttgctgctgaacaaggagtgtctgtgccctacagagccccaactagcacaattccagaagctcctgtggcacagggtgctactgctgagatttttgatgactcctgctgtaatggcaccctacgcaagccagtggcaccccatgtccaagaggacagtagcacccagaggtacagtgctgaccccaccgtgtttgccccagaacggagcccacgaggagagctggatgaggaaggttacatgactcctatgcgagacaaacccaaacaagaatacctgaatccagtggaggagaacccttttgtttctcggagaaaaaatggagaccttcaagcattggataatcccgaatatcacaatgcatccaatggtccacccaaggccgaggatgagtatgtgaatgagccactgtacctcaacacctttgccaacaccttgggaaaagctgagtacctgaagaacaacatactgtcaatgccagagaaggccaagaaagcgtttgacaaccctgactactggaaccacagcctgccacctcggagcacccttcagcacccagactacctgcaggagtacagcacaaaatatttttataaacagaatgggcggatccggcctattgtggcagagaatcctgaatacctctctgagttctccctgaagccaggcactgtgctgccgcctccaccttacagacaccggaatactgtggtgtaagctcagttgtggttttttaggtggagagacacacctgctccaatttccccacccccctctctttctctggtggtcttccttctaccccaaggccagtagttttgacacttcccagtggaagatacagagatgcaatgatagttatgtgcttacctaacttgaacattagagggaaagactgaaagagaaagataggaggaaccacaatgtttcttcatttctctgcatgggttggtcaggagaatgaaacagctagagaaggaccagaaaatgtaaggcaatgctgcctactatcaaactagctgtcactttttttctttttctttttctttctttgtttctttcttcctcttctttttttttttttttttaaagcagatggttgaaacacccatgctatctgttcctatctgcaggaactgatgtgtgcatatttagcatccctggaaatcataataaagtttccattagaacaaaagaataacattttctataacatatgatagtgtctgaaattgagaatccagtttctttccccagcagtttctgtcctagcaagtaagaatggccaactcaactttcataatttaaaaatctccattaaagttataactagtaattatgttttcaacactttttggtttttttcattttgttttgctctgaccgattcctttatatttgctcccctatttttggctttaatttctaattgcaaagatgtttacatcaaagcttcttcacagaatttaagcaagaaatattttaatatagtgaaatggccactactttaagtatacaatctttaaaataagaaagggaggctaatatttttcatgctatcaaattatcttcaccctcatcctttacatttttcaacatttttttttctccataaatgacactacttgataggccgttggttgtctgaagagtagaagggaaactaagagacagttctctgtggttcaggaaaactactgatactttcaggggtggcccaatgagggaatccattgaactggaagaaacacactggattgggtatgtctacctggcagatactcagaaatgtagtttgcacttaagctgtaattttatttgttctttttctgaactccattttggattttgaatcaagcaatatggaagcaaccagcaaattaactaatttaagtacatttttaaaaaaagagctaagataaagactgtggaaatgccaaaccaagcaaattaggaaccttgcaacggtatccagggactatgatgagaggccagcacattatcttcatatgtcacctttgctacgcaaggaaatttgttcagttcgtatacttcgtaagaaggaatgcgagtaaggattggcttgaattccatggaatttctagtatgagactatttatatgaagtagaaggtaactctttgcacataaattggtataataaaaagaaaaacacaaacattcaaagcttagggataggtccttgggtcaaaagttgtaaataaatgtgaaacatcttctc

SEQ ID NO: 25 - DNA, 4093 bp, Homo sapiens
cgcgcgctgcctgaggacgccgcggcccccgcccccgccatgggcgcccctgcctgcgccctcgcgctctgcgtggccgtggccatcgtggccggcgcctcctcggagtccttggggacggagcagcgcgtcgtggggcgagcggcagaagtcccgggcccagagcccggccagcaggagcagttggtcttcggcagcggggatgctgtggagctgagctgtcccccgcccgggggtggtcccatggggcccactgtctgggtcaaggatggcacagggctggtgccctcggagcgtgtcctggtggggccccagcggctgcaggtgctgaatgcctcccacgaggactccggggcctacagctgccggcagcggctcacgcagcgcgtactgtgccacttcagtgtgcgggtgacagacgctccatcctcgggagatgacgaagacggggaggacgaggctgaggacacaggtgtggacacaggggccccttactggacacggcccgagcggatggacaagaagctgctggccgtgccggccgccaacaccgtccgcttccgctgcccagccgctggcaaccccactccctccatctcctggctgaagaacggcagggagttccgcggcgagcaccgcattggaggcatcaagctgcggcatcagcagtggagcctggtcatggaaagcgtggtgccctcggaccgcggcaactacacctgcgtcgtggagaacaagtttggcagcatccggcagacgtacacgctggacgtgctggagcgctccccgcaccggcccatcctgcaggcggggctgccggccaaccagacggcggtgctgggcagcgacgtggagttccactgcaaggtgtacagtgacgcacagccccacatccagtggctcaagcacgtggaggtgaacggcagcaaggtgggcccggacggcacaccctacgttaccgtgctcaagacggcgggcgctaacaccaccgacaaggagctagaggttctctccttgcacaacgtcacctttgaggacgccggggagtacacctgcctggcgggcaattctattgggttttctcatcactctgcgtggctggtggtgctgccagccgaggaggagctggtggaggctgacgaggcgggcagtgtgtatgcaggcatcctcagctacggggtgggcttcttcctgttcatcctggtggtggcggctgtgacgctctgccgcctgcgcagcccccccaagaaaggcctgggctcccccaccgtgcacaagatctcccgcttcccgctcaagcgacaggtgtccctggagtccaacgcgtccatgagctccaacacaccactggtgcgcatcgcaaggctgtcctcaggggagggccccacgctggccaatgtctccgagctcgagctgcctgccgaccccaaatgggagctgtctcgggcccggctgaccctgggcaagccccttggggagggctgcttcggccaggtggtcatggcggaggccatcggcattgacaaggaccgggccgccaagcctgtcaccgtagccgtgaagatgctgaaagacgatgccactgacaaggacctgtcggacctggtgtctgagatggagatgatgaagatgatcgggaaacacaaaaacatcatcaacctgctgggcgcctgcacgcagggcgggcccctgtacgtgctggtggagtacgcggccaagggtaacctgcgggagtttctgcgggcgcggcggcccccgggcctggactactccttcgacacctgcaagccgcccgaggagcagctcaccttcaaggacctggtgtcctgtgcctaccaggtggcccggggcatggagtacttggcctcccagaagtgcatccacagggacctggctgcccgcaatgtgctggtgaccgaggacaacgtgatgaagatcgcagacttcgggctggcccgggacgtgcacaacctcgactactacaagaagacaaccaacggccggctgcccgtgaagtggatggcgcctgaggccttgtttgaccgagtctacactcaccagagtgacgtctggtcctttggggtcctgctctgggagatcttcacgctggggggctccccgtaccccggcatccctgtggaggagctcttcaagctgctgaaggagggccaccgcatggacaagcccgccaactgcacacacgacctgtacatgatcatgcgggagtgctggcatgccgcgccctcccagaggcccaccttcaagcagctggtggaggacctggaccgtgtccttaccgtgacgtccaccgacgagtacctggacctgtcggcgcctttcgagcagtactccccgggtggccaggacacccccagctccagctcctcaggggacgactccgtgtttgcccacgacctgctgcccccggccccacccagcagtgggggctcgcggacgtgaagggccactggtccccaacaatgtgaggggtccctagcagccctccctgctgctggtgcacagccactccccggcatgagactcagtgcagatggagagacagctacacagagctttggtctgtgtgtgtgtgtgtgcgtgtgtgtgtgtgtgtgcacatccgcgtgtgcctgtgtgcgtgcgcatcttgcctccaggtgcagaggtaccctgggtgtccccgctgctgtgcaacggtctcctgactggtgctgcagcaccgaggggcctttgttctggggggacccagtgcagaatgtaagtgggcccacccggtgggaccccgtggggcagggagctgggcccgacatggctcggcctctgcctttgcaccacgggacatcacagggtgcgctcggcccctcccacacccaaagctgagcctgcagggaagccccacatgtccagcaccttgtgcctggggtgttagtggcaccgcctccccacctccaggctttcccacttcccaccctgcccctcagagactgaaattacgggtacctgaagatgggagcctttaccttttatgcaaaaggtttattccggaaactagtgtacatttctataaatagatgctgtgtatatggtatatatacatatatatatataacatatatggaagaggaaaaggctggtacaacggaggcctgcgaccctgggggcacaggaggcaggcatggccctgggcggggcgtgggggggcgtggagggaggccccaggggtctcacccatgcaagcagaggaccagggctttttctggcaccgcagttttgttttaaaactggacctgtatatttgtaaagctatttatgggcccctggcactcttgttcccacaccccaacacttccagcatttagctggccacatggcggagagttttaatttttaacttattgacaaccgagaaggtttatcccgccgatagagggacggccaagaatgtacgtccagcctgccccggagctggaggatcccctccaagcctaaaaggttgttaatagttggaggtgattccagtgaagatattttatttgctttgtcctttttcaggagaattagatttctataggatttttctttaggagatttattttttggacttcaaagcaagctggtattttcatacaaattcttctaattgctgtgtgtcccaggcagggagacggtttccagggaggggccggccctgtgtgcaggttccgatgttattagatgttacaagtttatatatatctatatatataatttattgagtttttacaagatgtatttgttgtagacttaacacttcttacgcaatgcttctagagttttatagcctggactgctacctttcaaagcttggagggaagccgtgaattcagttggttcgttctgtactgttactgggccctgagtctgggcagctgtcccttgcttgcctgcagggccatggctcagggtggtctcttcttggggcccagtgcatggtggccagaggtgtcacccaaaccggcaggtgcgattttgttaacccagcgacgaactttccgaaaaataaagacacctggttgctaacctgaaaaaaaaaaaaaaaaaaaaaaaaaaaaaa

SEQ ID NO: 26 - DNA, 8680 bp, Homo sapiens
acggggcctgaagcggcggtaccggtgctggcggcggcagctgaggccttggccgaagccgcgcgaacctcagggcaagatgcttggaaccggacctgccgccgccaccaccgctgccaccacatctagcaatgtgagcgtcctgcagcagtttgccagtggcctaaagagccggaatgaggaaaccagggccaaagccgccaaggagctccagcactatgtcaccatggaactccgagagatgagtcaagaggagtctactcgcttctatgaccaactgaaccatcacatttttgaattggtttccagctcagatgccaatgagaggaaaggtggcatcttggccatagctagcctcataggagtggaaggtgggaatgccacccgaattggcagatttgccaactatcttcggaacctcctcccctccaatgacccagttgtcatggaaatggcatccaaggccattggccgtcttgccatggcaggggacacttttaccgctgagtacgtggaatttgaggtgaagcgagccctggaatggctgggtgctgaccgcaatgagggccggagacatgcagctgtcctggttctccgtgagctggccatcagcgtccctaccttcttcttccagcaagtgcaacccttctttgacaacatttttgtggccgtgtgggaccccaaacaggccatccgtgagggagctgtagccgcccttcgtgcctgtctgattctcacaacccagcgtgagccgaaggagatgcagaagcctcagtggtacaggcacacatttgaagaagcagagaagggatttgatgagaccttggccaaagagaagggcatgaatcgggatgatcggatccatggagccttgttgatccttaacgagctggtccgaatcagcagcatggagggagagcgtctgagagaagaaatggaagaaatcacacagcagcagctggtacacgacaagtactgcaaagatctcatgggcttcggaacaaaacctcgtcacattacccccttcaccagtttccaggctgtacagccccagcagtcaaatgccttggtggggctgctggggtacagctctcaccaaggcctcatgggatttgggacctcccccagtccagctaagtccaccctggtggagagccggtgttgcagagacttgatggaggagaaatttgatcaggtgtgccagtgggtgctgaaatgcaggaatagcaagaactcgctgatccaaatgacaatccttaatttgttgccccgcttggctgcattccgaccttctgccttcacagatacccagtatctccaagataccatgaaccatgtcctaagctgtgtcaagaaggagaaggaacgtacagcggccttccaagccctggggctactttctgtggctgtgaggtctgagtttaaggtctatttgcctcgcgtgctggacatcatccgagcggccctgcccccaaaggacttcgcccataagaggcagaaggcaatgcaggtggatgccacagtcttcacttgcatcagcatgctggctcgagcaatggggccaggcatccagcaggatatcaaggagctgctggagcccatgctggcagtgggactaagccctgccctcactgcagtgctctacgacctgagccgtcagattccacagctaaagaaggacattcaagatgggctactgaaaatgctgtccctggtccttatgcacaaaccccttcgccacccaggcatgcccaagggcctggcccatcagctggcctctcctggcctcacgaccctccctgaggccagcgatgtgggcagcatcactcttgccctccgaacgcttggcagctttgaatttgaaggccactctctgacccaatttgttcgccactgtgcggatcatttcctgaacagtgagcacaaggagatccgcatggaggctgcccgcacctgctcccgcctgctcacaccctccatccacctcatcagtggccatgctcatgtggttagccagaccgcagtgcaagtggtggcagatgtgcttagcaaactgctcgtagttgggataacagatcctgaccctgacattcgctactgtgtcttggcgtccctggacgagcgctttgatgcacacctggcccaggcggagaacttgcaggccttgtttgtggctctgaatgaccaggtgtttgagatccgggagctggccatctgcactgtgggccgactcagtagcatgaaccctgcctttgtcatgcctttcctgcgcaagatgctcatccagattttgacagagttggagcacagtgggattggaagaatcaaagagcagagtgcccgcatgctggggcacctggtctccaatgccccccgactcatccgcccctacatggagcctattctgaaggcattaattttgaaactgaaagatccagaccctgatccaaacccaggtgtgatcaataatgtcctggcaacaataggagaattggcacaggttagtggcctggaaatgaggaaatgggttgatgaactttttattatcatcatggacatgctccaggattcctctttgttggccaaaaggcaggtggctctgtggaccctgggacagttggtggccagcactggctatgtagtagagccctacaggaagtaccctactttgcttgaggtgctactgaattttctgaagactgagcagaaccagggtacacgcagagaggccatccgtgtgttagggcttttaggggctttggatccttacaagcacaaagtgaacattggcatgatagaccagtcccgggatgcctctgctgtcagcctgtcagaatccaagtcaagtcaggattcctctgactatagcactagtgaaatgctggtcaacatgggaaacttgcctctggatgagttctacccagctgtgtccatggtggccctgatgcggatcttccgagaccagtcactctctcatcatcacaccatggttgtccaggccatcaccttcatcttcaagtccctgggactcaaatgtgtgcagttcctgccccaggtcatgcccacgttccttaacgtcattcgagtctgtgatggggccatccgggaatttttgttccagcagctgggaatgttggtgtcctttgtgaagagccacatcagaccttatatggatgaaatagtcaccctcatgagagaattctgggtcatgaacacctcaattcagagcacgatcattcttctcattgagcaaattgtggtagctcttgggggtgaatttaagctctacctgccccagctgatcccacacatgctgcgtgtcttcatgcatgacaacagcccaggccgcattgtctctatcaagttactggctgcaatccagctgtttggcgccaacctggatgactacctgcatttactgctgcctcctattgttaagttgtttgatgcccctgaagctccactgccatctcgaaaggcagcgctagagactgtggaccgcctgacggagtccctggatttcactgactatgcctcccggatcattcaccctattgttcgaacactggaccagagcccagaactgcgctccacagccatggacacgctgtcttcacttgtttttcagctggggaagaagtaccaaattttcattccaatggtgaataaagttctggtgcgacaccgaatcaatcatcagcgctatgatgtgctcatctgcagaattgtcaagggatacacacttgctgatgaagaggaggatcctttgatttaccagcatcggatgcttaggagtggccaaggggatgcattggctagtggaccagtggaaacaggacccatgaagaaactgcacgtcagcaccatcaacctccaaaaggcctggggcgctgccaggagggtctccaaagatgactggctggaatggctgagacggctgagcctggagctgctgaaggactcatcatcgccctccctgcgctcctgctgggccctggcacaggcctacaacccgatggccagggatctcttcaatgctgcatttgtgtcctgctggtctgaactgaatgaagatcaacaggatgagctcatcagaagcatcgagttggccctcacctcacaagacatcgctgaagtcacacagaccctcttaaacttggctgaattcatggaacacagtgacaagggccccctgccactgagagatgacaatggcattgttctgctgggtgagagagctgccaagtgccgagcatatgccaaagcactacactacaaagaactggagttccagaaaggccccacccctgccattctagaatctctcatcagcattaataataagctacagcagccggaggcagcggccggagtgttagaatatgccatgaaacactttggagagctggagatccaggctacctggtatgagaaactgcacgagtgggaggatgcccttgtggcctatgacaagaaaatggacaccaacaaggacgacccagagctgatgctgggccgcatgcgctgcctcgaggccttgggggaatggggtcaactccaccagcagtgctgtgaaaagtggaccctggttaatgatgagacccaagccaagatggcccggatggctgctgcagctgcatggggtttaggtcagtgggacagcatggaagaatacacctgtatgatccctcgggacacccatgatggggcattttatagagctgtgctggcactgcatcaggacctcttctccttggcacaacagtgcattgacaaggccagggacctgctggatgctgaattaactgcgatggcaggagagagttacagtcgggcatatggggccatggtttcttgccacatgctgtccgagctggaggaggttatccagtacaaacttgtccccgagcgacgagagatcatccgccagatctggtgggagagactgcagggctgccagcgtatcgtagaggactggcagaaaatccttatggtgcggtcccttgtggtcagccctcatgaagacatgagaacctggctcaagtatgcaagcctgtgcggcaagagtggcaggctggctcttgctcataaaactttagtgttgctcctgggagttgatccgtctcggcaacttgaccatcctctgccaacagttcaccctcaggtgacctatgcctacatgaaaaacatgtggaagagtgcccgcaagatcgatgccttccagcacatgcagcattttgtccagaccatgcagcaacaggcccagcatgccatcgctactgaggaccagcagcataagcaggaactgcacaagctcatggcccgatgcttcctgaaacttggagagtggcagctgaatctacagggcatcaatgagagcacaatccccaaagtgctgcagtactacagcgccgccacagagcacgaccgcagctggtacaaggcctggcatgcgtgggcagtgatgaacttcgaagctgtgctacactacaaacatcagaaccaagcccgcgatgagaagaagaaactgcgtcatgccagcggggccaacatcaccaacgccaccactgccgccaccacggccgccactgccaccaccactgccagcaccgagggcagcaacagtgagagcgaggccgagagcaccgagaacagccccaccccatcgccgctgcagaagaaggtcactgaggatctgtccaaaaccctcctgatgtacacggtgcctgccgtccagggcttcttccgttccatctccttgtcacgaggcaacaacctccaggatacactcagagttctcaccttatggtttgattatggtcactggccagatgtcaatgaggccttagtggagggggtgaaagccatccagattgatacctggctacaggttatacctcagctcattgcaagaattgatacgcccagacccttggtgggacgtctcattcaccagcttctcacagacattggtcggtaccacccccaggccctcatctacccactgacagtggcttctaagtctaccacgacagcccggcacaatgcagccaacaagattctgaagaacatgtgtgagcacagcaacaccctggtccagcaggccatgatggtgagcgaggagctgatccgagtggccatcctctggcatgagatgtggcatgaaggcctggaagaggcatctcgtttgtactttggggaaaggaacgtgaaaggcatgtttgaggtgctggagcccttgcatgctatgatggaacggggcccccagactctgaaggaaacatcctttaatcaggcctatggtcgagatttaatggaggcccaagagtggtgcaggaagtacatgaaatcagggaatgtcaaggacctcacccaagcctgggacctctattatcatgtgttccgacgaatctcaaagcagctgcctcagctcacatccttagagctgcaatatgtttccccaaaacttctgatgtgccgggaccttgaattggctgtgccaggaacatatgaccccaaccagccaatcattcgcattcagtccatagcaccgtctttgcaagtcatcacatccaagcagaggccccggaaattgacacttatgggcagcaacggacatgagtttgttttccttctaaaaggccatgaagatctgcgccaggatgagcgtgtgatgcagctcttcggcctggttaacacccttctggccaatgacccaacatctcttcggaaaaacctcagcatccagagatacgctgtcatccctttatcgaccaactcgggcctcattggctgggttccccactgtgacacactgcacgccctcatccgggactacagggagaagaagaagatccttctcaacatcgagcatcgcatcatgttgcggatggctccggactatgaccacttgactctgatgcagaaggtggaggtgtttgagcatgccgtcaataatacagctggggacgacctggccaagctgctgtggctgaaaagccccagctccgaggtgtggtttgaccgaagaaccaattatacccgttctttagcggtcatgtcaatggttgggtatattttaggcctgggagatagacacccatccaacctgatgctggaccgtctgagtgggaagatcctgcacattgactttggggactgctttgaggttgctatgacccgagagaagtttccagagaagattccatttagactaacaagaatgttgaccaatgctatggaggttacaggcctggatggcaactacagaatcacatgccacacagtgatggaggtgctgcgagagcacaaggacagtgtcatggccgtgctggaagcctttgtctatgaccccttgctgaactggaggctgatggacacaaataccaaaggcaacaagcgatcccgaacgaggacggattcctactctgctggccagtcagtcgaaattttggacggtgtggaacttggagagccagcccataagaaaacggggaccacagtgccagaatctattcattctttcattggagacggtttggtgaaaccagaggccctaaataagaaagctatccagattattaacagggttcgagataagctcactggtcgggacttctctcatgatgacactttggatgttccaacgcaagttgagctgctcatcaaacaagcgacatcccatgaaaacctctgccagtgctatattggctggtgccctttctggtaactggaggcccagatgtgcccatcacgttttttctgaggcttttgtactttagtaaatgcttccactaaactgaaaccatggtgagaaagtttgactttgttaaatattttgaaatgtaaatgaaaagaactactgtatattaaaagttggtttgaaccaactttctagctgctgttgaagaatatattgtcagaaacacaaggcttgatttggttcccaggacagtgaaacaatagtaataccacgtaaatcaagccattcattttggggaacagaagatccataactttagaaatacgggttttgacttaactcacaagagaactcatcataagtacttgctgatggaagaatgacctagttgctcctctcaacatgggtacagcaaactcagcacagccaagaagcctcaggtcgtggagaacatggattaggatcctagactgtaaagacacagaagatgctgacctcacccctgccacctatcccaagacctcactggtctgtggacagcagcagaaatgtttgcaagataggccaaaatgagtacaaaaggtctgtcttccatcagacccagtgatgctgcgactcacacgcttcaattcaagacctgaccgctagtagggaggtttattcagatcgctggcagcctcggctgagcagatgcacagaggggatcactgtgcagtgggaccaccctcactggccttctgcagcagggttctgggatgttttcagtggtcaaaatactctgtttagagcaagggctcagaaaacagaaatactgtcatggaggtgctgaacacagggaaggtctggtacatattggaaattatgagcagaacaaatactcaactaaatgcacaaagtataaagtgtagccatgtctagacaccatgttgtatcagaataatttttgtgccaataaatgacatcagaattttaaacata

SEQ ID NO: 27 - DNA, 5830 bp, Homo sapiens
actgagtcccgggaccccgggagagcggtcagtgtgtggtcgctgcgtttcctctgcctgcgccgggcatcacttgcgcgccgcagaaagtccgtctggcagcctggatatcctctcctaccggcacccgcagacgcccctgcagccgccggtcggcgcccgggctccctagccctgtgcgctcaactgtcctgcgctgcggggtgccgcgagttccacctccgcgcctccttctctagacaggcgctgggagaaagaaccggctcccgagttctgggcatttcgcccggctcgaggtgcaggatgcagagcaaggtgctgctggccgtcgccctgtggctctgcgtggagacccgggccgcctctgtgggtttgcctagtgtttctcttgatctgcccaggctcagcatacaaaaagacatacttacaattaaggctaatacaactcttcaaattacttgcaggggacagagggacttggactggctttggcccaataatcagagtggcagtgagcaaagggtggaggtgactgagtgcagcgatggcctcttctgtaagacactcacaattccaaaagtgatcggaaatgacactggagcctacaagtgcttctaccgggaaactgacttggcctcggtcatttatgtctatgttcaagattacagatctccatttattgcttctgttagtgaccaacatggagtcgtgtacattactgagaacaaaaacaaaactgtggtgattccatgtctcgggtccatttcaaatctcaacgtgtcactttgtgcaagatacccagaaaagagatttgttcctgatggtaacagaatttcctgggacagcaagaagggctttactattcccagctacatgatcagctatgctggcatggtcttctgtgaagcaaaaattaatgatgaaagttaccagtctattatgtacatagttgtcgttgtagggtataggatttatgatgtggttctgagtccgtctcatggaattgaactatctgttggagaaaagcttgtcttaaattgtacagcaagaactgaactaaatgtggggattgacttcaactgggaatacccttcttcgaagcatcagcataagaaacttgtaaaccgagacctaaaaacccagtctgggagtgagatgaagaaatttttgagcaccttaactatagatggtgtaacccggagtgaccaaggattgtacacctgtgcagcatccagtgggctgatgaccaagaagaacagcacatttgtcagggtccatgaaaaaccttttgttgcttttggaagtggcatggaatctctggtggaagccacggtgggggagcgtgtcagaatccctgcgaagtaccttggttacccacccccagaaataaaatggtataaaaatggaataccccttgagtccaatcacacaattaaagcggggcatgtactgacgattatggaagtgagtgaaagagacacaggaaattacactgtcatccttaccaatcccatttcaaaggagaagcagagccatgtggtctctctggttgtgtatgtcccaccccagattggtgagaaatctctaatctctcctgtggattcctaccagtacggcaccactcaaacgctgacatgtacggtctatgccattcctcccccgcatcacatccactggtattggcagttggaggaagagtgcgccaacgagcccagccaagctgtctcagtgacaaacccatacccttgtgaagaatggagaagtgtggaggacttccagggaggaaataaaattgaagttaataaaaatcaatttgctctaattgaaggaaaaaacaaaactgtaagtacccttgttatccaagcggcaaatgtgtcagctttgtacaaatgtgaagcggtcaacaaagtcgggagaggagagagggtgatctccttccacgtgaccaggggtcctgaaattactttgcaacctgacatgcagcccactgagcaggagagcgtgtctttgtggtgcactgcagacagatctacgtttgagaacctcacatggtacaagcttggcccacagcctctgccaatccatgtgggagagttgcccacacctgtttgcaagaacttggatactctttggaaattgaatgccaccatgttctctaatagcacaaatgacattttgatcatggagcttaagaatgcatccttgcaggaccaaggagactatgtctgccttgctcaagacaggaagaccaagaaaagacattgcgtggtcaggcagctcacagtcctagagcgtgtggcacccacgatcacaggaaacctggagaatcagacgacaagtattggggaaagcatcgaagtctcatgcacggcatctgggaatccccctccacagatcatgtggtttaaagataatgagacccttgtagaagactcaggcattgtattgaaggatgggaaccggaacctcactatccgcagagtgaggaaggaggacgaaggcctctacacctgccaggcatgcagtgttcttggctgtgcaaaagtggaggcatttttcataatagaaggtgcccaggaaaagacgaacttggaaatcattattctagtaggcacggcggtgattgccatgttcttctggctacttcttgtcatcatcctacggaccgttaagcgggccaatggaggggaactgaagacaggctacttgtccatcgtcatggatccagatgaactcccattggatgaacattgtgaacgactgccttatgatgccagcaaatgggaattccccagagaccggctgaagctaggtaagcctcttggccgtggtgcctttggccaagtgattgaagcagatgcctttggaattgacaagacagcaacttgcaggacagtagcagtcaaaatgttgaaagaaggagcaacacacagtgagcatcgagctctcatgtctgaactcaagatcctcattcatattggtcaccatctcaatgtggtcaaccttctaggtgcctgtaccaagccaggagggccactcatggtgattgtggaattctgcaaatttggaaacctgtccacttacctgaggagcaagagaaatgaatttgtcccctacaagaccaaaggggcacgattccgtcaagggaaagactacgttggagcaatccctgtggatctgaaacggcgcttggacagcatcaccagtagccagagctcagccagctctggatttgtggaggagaagtccctcagtgatgtagaagaagaggaagctcctgaagatctgtataaggacttcctgaccttggagcatctcatctgttacagcttccaagtggctaagggcatggagttcttggcatcgcgaaagtgtatccacagggacctggcggcacgaaatatcctcttatcggagaagaacgtggttaaaatctgtgactttggcttggcccgggatatttataaagatccagattatgtcagaaaaggagatgctcgcctccctttgaaatggatggccccagaaacaatttttgacagagtgtacacaatccagagtgacgtctggtcttttggtgttttgctgtgggaaatattttccttaggtgcttctccatatcctggggtaaagattgatgaagaattttgtaggcgattgaaagaaggaactagaatgagggcccctgattatactacaccagaaatgtaccagaccatgctggactgctggcacggggagcccagtcagagacccacgttttcagagttggtggaacatttgggaaatctcttgcaagctaatgctcagcaggatggcaaagactacattgttcttccgatatcagagactttgagcatggaagaggattctggactctctctgcctacctcacctgtttcctgtatggaggaggaggaagtatgtgaccccaaattccattatgacaacacagcaggaatcagtcagtatctgcagaacagtaagcgaaagagccggcctgtgagtgtaaaaacatttgaagatatcccgttagaagaaccagaagtaaaagtaatcccagatgacaaccagacggacagtggtatggttcttgcctcagaagagctgaaaactttggaagacagaaccaaattatctccatcttttggtggaatggtgcccagcaaaagcagggagtctgtggcatctgaaggctcaaaccagacaagcggctaccagtccggatatcactccgatgacacagacaccaccgtgtactccagtgaggaagcagaacttttaaagctgatagagattggagtgcaaaccggtagcacagcccagattctccagcctgactcggggaccacactgagctctcctcctgtttaaaaggaagcatccacaccccaactcccggacatcacatgagaggtctgctcagattttgaagtgttgttctttccaccagcaggaagtagccgcatttgattttcatttcgacaacagaaaaaggacctcggactgcagggagccagtcttctaggcatatcctggaagaggcttgtgacccaagaatgtgtctgtgtcttctcccagtgttgacctgatcctcttttttcattcatttaaaaagcattatcatgcccctgctgcgggtctcaccatgggtttagaacaaagagcttcaagcaatggccccatcctcaaagaagtagcagtacctggggagctgacacttctgtaaaactagaagataaaccaggcaacgtaagtgttcgaggtgttgaagatgggaaggatttgcagggctgagtctatccaagaggctttgtttaggacgtgggtcccaagccaagccttaagtgtggaattcggattgatagaaaggaagactaacgttaccttgctttggagagtactggagcctgcaaatgcattgtgtttgctctggtggaggtgggcatggggtctgttctgaaatgtaaagggttcagacggggtttctggttttagaaggttgcgtgttcttcgagttgggctaaagtagagttcgttgtgctgtttctgactcctaatgagagttccttccagaccgttagctgtctccttgccaagccccaggaagaaaatgatgcagctctggctccttgtctcccaggctgatcctttattcagaataccacaaagaaaggacattcagctcaaggctccctgccgtgttgaagagttctgactgcacaaaccagcttctggtttcttctggaatgaataccctcatatctgtcctgatgtgatatgtctgagactgaatgcgggaggttcaatgtgaagctgtgtgtggtgtcaaagtttcaggaaggattttacccttttgttcttccccctgtccccaacccactctcaccccgcaacccatcagtattttagttatttggcctctactccagtaaacctgattgggtttgttcactctctgaatgattattagccagacttcaaaattattttatagcccaaattataacatctattgtattatttagacttttaacatatagagctatttctactgatttttgcccttgttctgtcctttttttcaaaaaagaaaatgtgttttttgtttggtaccatagtgtgaaatgctgggaacaatgactataagacatgctatggcacatatatttatagtctgtttatgtagaaacaaatgtaatatattaaagccttatatataatgaactttgtactattcacattttgtatcagtattatgtagcataacaaaggtcataatgctttcagcaattgatgtcattttattaaagaacattgaaaaacttga

SEQ ID NO: 28 - DNA, 1759 bp, Homo sapiens
cccctgcctctcggactcgggctgcggcgtcagccttcttcgggcctcggcagcggtagcggctcgctcgcctcagccccagcgcccctcggctaccctcggcccaggcccgcagcgccgcccgccctcggccgccccgacgccggcctgggccgcggccgcagccccgggctcgcgtaggcgccgaccgctcccggcccgccccctatgggccccggctagaggcgccgccgccgccggcccgcggagccccgatgctggcccggaggaagccggtgctgccggcgctcaccatcaaccctaccatcgccgagggcccatcccctaccagcgagggcgcctccgaggcaaacctggtggacctgcagaagaagctggaggagctggaacttgacgagcagcagaagaagcggctggaagcctttctcacccagaaagccaaggtcggcgaactcaaagacgatgacttcgaaaggatctcagagctgggcgcgggcaacggcggggtggtcaccaaagtccagcacagaccctcgggcctcatcatggccaggaagctgatccaccttgagatcaagccggccatccggaaccagatcatccgcgagctgcaggtcctgcacgaatgcaactcgccgtacatcgtgggcttctacggggccttctacagtgacggggagatcagcatttgcatggaacacatggacggcggctccctggaccaggtgctgaaagaggccaagaggattcccgaggagatcctggggaaagtcagcatcgcggttctccggggcttggcgtacctccgagagaagcaccagatcatgcaccgagatgtgaagccctccaacatcctcgtgaactctagaggggagatcaagctgtgtgacttcggggtgagcggccagctcatagactccatggccaactccttcgtgggcacgcgctcctacatggctccggagcggttgcagggcacacattactcggtgcagtcggacatctggagcatgggcctgtccctggtggagctggccgtcggaaggtaccccatccccccgcccgacgccaaagagctggaggccatctttggccggcccgtggtcgacggggaagaaggagagcctcacagcatctcgcctcggccgaggccccccgggcgccccgtcagcggtcacgggatggatagccggcctgccatggccatctttgaactcctggactatattgtgaacgagccacctcctaagctgcccaacggtgtgttcacccccgacttccaggagtttgtcaataaatgcctcatcaagaacccagcggagcgggcggacctgaagatgctcacaaaccacaccttcatcaagcggtccgaggtggaagaagtggattttgccggctggttgtgtaaaaccctgcggctgaaccagcccggcacacccacgcgcaccgccgtgtgacagtggccgggctccctgcgtcccgctggtgacctgcccaccgtccctgtccatgccccgcccttccagctgaggacaggctggcgcctccacccaccctcctgcctcacccctgcggagagcaccgtggcggggcgacagcgcatgcaggaacgggggtctcctctcctgcccgtcctggccggggtgcctctggggacgggcgacgctgctgtgtgtggtctcagaggctctgcttccttaggttacaaaacaaaacagggagagaaaaagcaaaaaaaaaaaaaaaaaaaaaaaaaaaa

SEQ ID NO: 29 - DNA, 6641 bp, Homo sapiens
gccctcgccgcccgcggcgccccgagcgctttgtgagcagatgcggagccgagtggagggcgcgagccagatgcggggcgacagctgacttgctgagaggaggcggggaggcgcggagcgcgcgtgtggtccttgcgccgctgacttctccactggttcctgggcaccgaaagataaacctctcataatgaaggcccccgctgtgcttgcacctggcatcctcgtgctcctgtttaccttggtgcagaggagcaatggggagtgtaaagaggcactagcaaagtccgagatgaatgtgaatatgaagtatcagcttcccaacttcaccgcggaaacacccatccagaatgtcattctacatgagcatcacattttccttggtgccactaactacatttatgttttaaatgaggaagaccttcagaaggttgctgagtacaagactgggcctgtgctggaacacccagattgtttcccatgtcaggactgcagcagcaaagccaatttatcaggaggtgtttggaaagataacatcaacatggctctagttgtcgacacctactatgatgatcaactcattagctgtggcagcgtcaacagagggacctgccagcgacatgtctttccccacaatcatactgctgacatacagtcggaggttcactgcatattctccccacagatagaagagcccagccagtgtcctgactgtgtggtgagcgccctgggagccaaagtcctttcatctgtaaaggaccggttcatcaacttctttgtaggcaataccataaattcttcttatttcccagatcatccattgcattcgatatcagtgagaaggctaaaggaaacgaaagatggttttatgtttttgacggaccagtcctacattgatgttttacctgagttcagagattcttaccccattaagtatgtccatgcctttgaaagcaacaattttatttacttcttgacggtccaaagggaaactctagatgctcagacttttcacacaagaataatcaggttctgttccataaactctggattgcattcctacatggaaatgcctctggagtgtattctcacagaaaagagaaaaaagagatccacaaagaaggaagtgtttaatatacttcaggctgcgtatgtcagcaagcctggggcccagcttgctagacaaataggagccagcctgaatgatgacattcttttcggggtgttcgcacaaagcaagccagattctgccgaaccaatggatcgatctgccatgtgtgcattccctatcaaatatgtcaacgacttcttcaacaagatcgtcaacaaaaacaatgtgagatgtctccagcatttttacggacccaatcatgagcactgctttaataggacacttctgagaaattcatcaggctgtgaagcgcgccgtgatgaatatcgaacagagtttaccacagctttgcagcgcgttgacttattcatgggtcaattcagcgaagtcctcttaacatctatatccaccttcattaaaggagacctcaccatagctaatcttgggacatcagagggtcgcttcatgcaggttgtggtttctcgatcaggaccatcaacccctcatgtgaattttctcctggactcccatccagtgtctccagaagtgattgtggagcatacattaaaccaaaatggctacacactggttatcactgggaagaagatcacgaagatcccattgaatggcttgggctgcagacatttccagtcctgcagtcaatgcctctctgccccaccctttgttcagtgtggctggtgccacgacaaatgtgtgcgatcggaggaatgcctgagcgggacatggactcaacagatctgtctgcctgcaatctacaaggttttcccaaatagtgcaccccttgaaggagggacaaggctgaccatatgtggctgggactttggatttcggaggaataataaatttgatttaaagaaaactagagttctccttggaaatgagagctgcaccttgactttaagtgagagcacgatgaatacattgaaatgcacagttggtcctgccatgaataagcatttcaatatgtccataattatttcaaatggccacgggacaacacaatacagtacattctcctatgtggatcctgtaataacaagtatttcgccgaaatacggtcctatggctggtggcactttacttactttaactggaaattacctaaacagtgggaattctagacacatttcaattggtggaaaaacatgtactttaaaaagtgtgtcaaacagtattcttgaatgttataccccagcccaaaccatttcaactgagtttgctgttaaattgaaaattgacttagccaaccgagagacaagcatcttcagttaccgtgaagatcccattgtctatgaaattcatccaaccaaatcttttattagtggtgggagcacaataacaggtgttgggaaaaacctgaattcagttagtgtcccgagaatggtcataaatgtgcatgaagcaggaaggaactttacagtggcatgtcaacatcgctctaattcagagataatctgttgtaccactccttccctgcaacagctgaatctgcaactccccctgaaaaccaaagcctttttcatgttagatgggatcctttccaaatactttgatctcatttatgtacataatcctgtgtttaagccttttgaaaagccagtgatgatctcaatgggcaatgaaaatgtactggaaattaagggaaatgatattgaccctgaagcagttaaaggtgaagtgttaaaagttggaaataagagctgtgagaatatacacttacattctgaagccgttttatgcacggtccccaatgacctgctgaaattgaacagcgagctaaatatagagtggaagcaagcaatttcttcaaccgtccttggaaaagtaatagttcaaccagatcagaatttcacaggattgattgctggtgttgtctcaatatcaacagcactgttattactacttgggtttttcctgtggctgaaaaagagaaagcaaattaaagatctgggcagtgaattagttcgctacgatgcaagagtacacactcctcatttggataggcttgtaagtgcccgaagtgtaagcccaactacagaaatggtttcaaatgaatctgtagactaccgagctacttttccagaagatcagtttcctaattcatctcagaacggttcatgccgacaagtgcagtatcctctgacagacatgtcccccatcctaactagtggggactctgatatatccagtccattactgcaaaatactgtccacattgacctcagtgctctaaatccagagctggtccaggcagtgcagcatgtagtgattgggcccagtagcctgattgtgcatttcaatgaagtcataggaagagggcattttggttgtgtatatcatgggactttgttggacaatgatggcaagaaaattcactgtgctgtgaaatccttgaacagaatcactgacataggagaagtttcccaatttctgaccgagggaatcatcatgaaagattttagtcatcccaatgtcctctcgctcctgggaatctgcctgcgaagtgaagggtctccgctggtggtcctaccatacatgaaacatggagatcttcgaaatttcattcgaaatgagactcataatccaactgtaaaagatcttattggctttggtcttcaagtagccaaaggcatgaaatatcttgcaagcaaaaagtttgtccacagagacttggctgcaagaaactgtatgctggatgaaaaattcacagtcaaggttgctgattttggtcttgccagagacatgtatgataaagaatactatagtgtacacaacaaaacaggtgcaaagctgccagtgaagtggatggctttggaaagtctgcaaactcaaaagtttaccaccaagtcagatgtgtggtcctttggcgtgctcctctgggagctgatgacaagaggagccccaccttatcctgacgtaaacacctttgatataactgtttacttgttgcaagggagaagactcctacaacccgaatactgcccagaccccttatatgaagtaatgctaaaatgctggcaccctaaagccgaaatgcgcccatccttttctgaactggtgtcccggatatcagcgatcttctctactttcattggggagcactatgtccatgtgaacgctacttatgtgaacgtaaaatgtgtcgctccgtatccttctctgttgtcatcagaagataacgctgatgatgaggtggacacacgaccagcctccttctgggagacatcatagtgctagtactatgtcaaagcaacagtccacactttgtccaatggttttttcactgcctgacctttaaaaggccatcgatattctttgctcttgccaaaattgcactattataggacttgtattgttatttaaattactggattctaaggaatttcttatctgacagagcatcagaaccagaggcttggtcccacaggccacggaccaatggcctgcagccgtgacaacactcctgtcatattggagtccaaaacttgaattctgggttgaattttttaaaaatcaggtaccacttgatttcatatgggaaattgaagcaggaaatattgagggcttcttgatcacagaaaactcagaagagatagtaatgctcaggacaggagcggcagccccagaacaggccactcatttagaattctagtgtttcaaaacacttttgtgtgttgtatggtcaataacatttttcattactgatggtgtcattcacccattaggtaaacattcccttttaaatgtttgtttgttttttgagacaggatctcactctgttgccagggctgtagtgcagtggtgtgatcatagctcactgcaacctccacctcccaggctcaagcctcccgaatagctgggactacaggcgcacaccaccatccccggctaatttttgtattttttgtagagacggggttttgccatgttgccaaggctggtttcaaactcctggactcaagaaatccacccacctcagcctcccaaagtgctaggattacaggcatgagccactgcgcccagcccttataaatttttgtatagacattcctttggttggaagaatatttataggcaatacagtcaaagtttcaaaatagcatcacacaaaacatgtttataaatgaacaggatgtaatgtacatagatgacattaagaaaatttgtatgaaataatttagtcatcatgaaatatttagttgtcatataaaaacccactgtttgagaatgatgctactctgatctaatgaatgtgaacatgtagatgttttgtgtgtatttttttaaatgaaaactcaaaataagacaagtaatttgttgataaatatttttaaagataactcagcatgtttgtaaagcaggatacattttactaaaaggttcattggttccaatcacagctcataggtagagcaaagaaagggtggatggattgaaaagattagcctctgtctcggtggcaggttcccacctcgcaagcaattggaaacaaaacttttggggagttttattttgcattagggtgtgttttatgttaagcaaaacatactttagaaacaaatgaaaaaggcaattgaaaatcccagctatttcacctagatggaatagccaccctgagcagaactttgtgatgcttcattctgtggaattttgtgcttgctactgtatagtgcatgtggtgtaggttactctaactggttttgtcgacgtaaacatttaaagtgttatattttttataaaaatgtttatttttaatgatatgagaaaaattttgttaggccacaaaaacactgcactgtgaacattttagaaaaggtatgtcagactgggattaatgacagcatgattttcaatgactgtaaattgcgataaggaaatgtactgattgccaatacaccccaccctcattacatcatcaggacttgaagccaagggttaacccagcaagctacaaagagggtgtgtcacactgaaactcaatagttgagtttggctgttgttgcaggaaaatgattataactaaaagctctctgatagtgcagagacttaccagaagacacaaggaattgtactgaagagctattacaatccaaatattgccgtttcataaatgtaataagtaatactaattcacagagtattgtaaatggtggatgacaaaagaaaatctgctctgtggaaagaaagaactgtctctaccagggtcaagagcatgaacgcatcaatagaaagaactcggggaaacatcccatcaacaggactacacacttgtatatacattcttgagaacactgcaatgtgaaaatcacgtttgctatttataaacttgtccttagattaatgtgtctggacagattgtgggagtaagtgattcttctaagaattagatacttgtcactgcctatacctgcagctgaactgaatggtacttcgtatgttaatagttgttctgataaatcatgcaattaaagtaaagtgatgcaacatcttgtaaaaaaaaaaaaaaaaaaaa

SEQ ID NO: 30 - DNA, 3724 bp, Homo sapiens
tctccctcggcgccgccgccgccgcccgcggggctgggacccgatgcggttagagccgcggagcctggaagagccccgagcgtttctgctttgggacaaccatacatctaattccttaaagtagttttatatgtaaaacttgcaaagaatcagaacaatgcctccacgaccatcatcaggtgaactgtggggcatccacttgatgcccccaagaatcctagtagaatgtttactaccaaatggaatgatagtgactttagaatgcctccgtgaggctacattaataaccataaagcatgaactatttaaagaagcaagaaaataccccctccatcaacttcttcaagatgaatcttcttacattttcgtaagtgttactcaagaagcagaaagggaagaattttttgatgaaacaagacgactttgtgaccttcggctttttcaaccctttttaaaagtaattgaaccagtaggcaaccgtgaagaaaagatcctcaatcgagaaattggttttgctatcggcatgccagtgtgtgaatttgatatggttaaagatccagaagtacaggacttccgaagaaatattctgaacgtttgtaaagaagctgtggatcttagggacctcaattcacctcatagtagagcaatgtatgtctatcctccaaatgtagaatcttcaccagaattgccaaagcacatatataataaattagataaagggcaaataatagtggtgatctgggtaatagtttctccaaataatgacaagcagaagtatactctgaaaatcaaccatgactgtgtaccagaacaagtaattgctgaagcaatcaggaaaaaaactcgaagtatgttgctatcctctgaacaactaaaactctgtgttttagaatatcagggcaagtatattttaaaagtgtgtggatgtgatgaatacttcctagaaaaatatcctctgagtcagtataagtatataagaagctgtataatgcttgggaggatgcccaatttgatgttgatggctaaagaaagcctttattctcaactgccaatggactgttttacaatgccatcttattccagacgcatttccacagctacaccatatatgaatggagaaacatctacaaaatccctttgggttataaatagtgcactcagaataaaaattctttgtgcaacctacgtgaatgtaaatattcgagacattgataagatctatgttcgaacaggtatctaccatggaggagaacccttatgtgacaatgtgaacactcaaagagtaccttgttccaatcccaggtggaatgaatggctgaattatgatatatacattcctgatcttcctcgtgctgctcgactttgcctttccatttgctctgttaaaggccgaaagggtgctaaagaggaacactgtccattggcatggggaaatataaacttgtttgattacacagacactctagtatctggaaaaatggctttgaatctttggccagtacctcatggattagaagatttgctgaaccctattggtgttactggatcaaatccaaataaagaaactccatgcttagagttggagtttgactggttcagcagtgtggtaaagttcccagatatgtcagtgattgaagagcatgccaattggtctgtatcccgagaagcaggatttagctattcccacgcaggactgagtaacagactagctagagacaatgaattaagggaaaatgacaaagaacagctcaaagcaatttctacacgagatcctctctctgaaatcactgagcaggagaaagattttctatggagtcacagacactattgtgtaactatccccgaaattctacccaaattgcttctgtctgttaaatggaattctagagatgaagtagcccagatgtattgcttggtaaaagattggcctccaatcaaacctgaacaggctatggaacttctggactgtaattacccagatcctatggttcgaggttttgctgttcggtgcttggaaaaatatttaacagatgacaaactttctcagtatttaattcagctagtacaggtcctaaaatatgaacaatatttggataacttgcttgtgagatttttactgaagaaagcattgactaatcaaaggattgggcactttttcttttggcatttaaaatctgagatgcacaataaaacagttagccagaggtttggcctgcttttggagtcctattgtcgtgcatgtgggatgtatttgaagcacctgaataggcaagtcgaggcaatggaaaagctcattaacttaactgacattctcaaacaggagaagaaggatgaaacacaaaaggtacagatgaagtttttagttgagcaaatgaggcgaccagatttcatggatgctctacagggctttctgtctcctctaaaccctgctcatcaactaggaaacctcaggcttgaagagtgtcgaattatgtcctctgcaaaaaggccactgtggttgaattgggagaacccagacatcatgtcagagttactgtttcagaacaatgagatcatctttaaaaatggggatgatttacggcaagatatgctaacacttcaaattattcgtattatggaaaatatctggcaaaatcaaggtcttgatcttcgaatgttaccttatggttgtctgtcaatcggtgactgtgtgggacttattgaggtggtgcgaaattctcacactattatgcaaattcagtgcaaaggcggcttgaaaggtgcactgcagttcaacagccacacactacatcagtggctcaaagacaagaacaaaggagaaatatatgatgcagccattgacctgtttacacgttcatgtgctggatactgtgtagctaccttcattttgggaattggagatcgtcacaatagtaacatcatggtgaaagacgatggacaactgtttcatatagattttggacactttttggatcacaagaagaaaaaatttggttataaacgagaacgtgtgccatttgttttgacacaggatttcttaatagtgattagtaaaggagcccaagaatgcacaaagacaagagaatttgagaggtttcaggagatgtgttacaaggcttatctagctattcgacagcatgccaatctcttcataaatcttttctcaatgatgcttggctctggaatgccagaactacaatcttttgatgacattgcatacattcgaaagaccctagccttagataaaactgagcaagaggctttggagtatttcatgaaacaaatgaatgatgcacatcatggtggctggacaacaaaaatggattggatcttccacacaattaaacagcatgcattgaactgaaaagataactgagaaaatgaaagctcactctggattccacactgcactgttaataactctcagcaggcaaagaccgattgcataggaattgcacaatccatgaacagcattagaatttacagcaagaacagaaataaaatactatataatttaaataatgtaaacgcaaacagggtttgatagcacttaaactagttcatttcaaaattaagctttagaataatgcgcaatttcatgttatgccttaagtccaaaaaggtaaactttgaagattgtttgtatctttttttaaaaaacaaaacaaaacaaaaatccccaaaatatatagaaatgatggagaaggaaaaaaaaaaaaaaaaa

SEQ ID NO: 31 - DNA, 2204 bp, Homo sapiens
gagcggtgcggaggctctgctcggatcgaggtctgcagcgcagcttcgggagcatgagtgctgcagtgactgcagggaagctggcacgggcaccggccgaccctgggaaagccggggtccccggagttgcagctcccggagctccggcggcggctccaccggcgaaagagatcccggaggtcctagtggacccacgcagccggcggcgctatgtgcggggccgctttttgggcaagggcggctttgccaagtgcttcgagatctcggacgcggacaccaaggaggtgttcgcgggcaagattgtgcctaagtctctgctgctcaagccgcaccagagggagaagatgtccatggaaatatccattcaccgcagcctcgcccaccagcacgtcgtaggattccacggctttttcgaggacaacgacttcgtgttcgtggtgttggagctctgccgccggaggtctctcctggagctgcacaagaggaggaaagccctgactgagcctgaggcccgatactacctacggcaaattgtgcttggctgccagtacctgcaccgaaaccgagttattcatcgagacctcaagctgggcaaccttttcctgaatgaagatctggaggtgaaaataggggattttggactggcaaccaaagtcgaatatgacggggagaggaagaagaccctgtgtgggactcctaattacatagctcccgaggtgctgagcaagaaagggcacagtttcgaggtggatgtgtggtccattgggtgtatcatgtataccttgttagtgggcaaaccaccttttgagacttcttgcctaaaagagacctacctccggatcaagaagaatgaatacagtattcccaagcacatcaaccccgtggccgcctccctcatccagaagatgcttcagacagatcccactgcccgcccaaccattaacgagctgcttaatgacgagttctttacttctggctatatccctgcccgtctccccatcacctgcctgaccattccaccaaggttttcgattgctcccagcagcctggaccccagcaaccggaagcccctcacagtcctcaataaaggcttggagaaccccctgcctgagcgtccccgggaaaaagaagaaccagtggttcgagagacaggtgaggtggtcgactgccacctcagtgacatgctgcagcagctgcacagtgtcaatgcctccaagccctcggagcgtgggctggtcaggcaagaggaggctgaggatcctgcctgcatccccatcttctgggtcagcaagtgggtggactattcggacaagtacggccttgggtatcagctctgtgataacagcgtgggggtgctcttcaatgactcaacacgcctcatcctctacaatgatggtgacagcctgcagtacatagagcgtgacggcactgagtcctacctcaccgtgagttcccatcccaactccttgatgaagaagatcaccctccttaaatatttccgcaattacatgagcgagcacttgctgaaggcaggtgccaacatcacgccgcgcgaaggtgatgagctcgcccggctgccctacctacggacctggttccgcacccgcagcgccatcatcctgcacctcagcaacggcagcgtgcagatcaacttcttccaggatcacaccaagctcatcttgtgcccactgatggcagccgtgacctacatcgacgagaagcgggacttccgcacataccgcctgagtctcctggaggagtacggctgctgcaaggagctggccagccggctccgctacgcccgcactatggtggacaagctgctgagctcacgctcggccagcaaccgtctcaaggcctcctaatagctgccctcccctccggactggtgccctcctcactcccacctgcatctggggcccatactggttggctcccgcggtgccatgtctgcagtgtgccccccagccccggtggctgggcagagctgcatcatccttgcaggtgggggttgctgtgtaagttatttttgtacatgttcgggtgtgggttctacagccttgtccccctccccctcaaccccaccatatgaattgtacagaatatttctattgaattcggaactgtcctttccttggctttatgcacattaaacagatgtgaatattcaaaaaaaaaaaaaaaaaaaaaaaaaaaaaaaaaaa

SEQ ID NO: 32 - DNA, 6825 bp, Homo sapiens
gcgcccgccgtgtgagcagcagcagcggctggtctgtcaaccggagcccgagcccgagcagcctgcggccagcagcgtcctcgcaagccgagcgcccaggcgcgccaggagcccgcagcagcggcagcagcgcgccgggccgcccgggaagcctccgtccccgcggcggcggcggcggcggcggcaacatggcctcggctggtaacgccgccgagccccaggaccgcggcggcggcggcagcggctgtatcggtgccccgggacggccggctggaggcgggaggcgcagacggacgggggggctgcgccgtgctgccgcgccggaccgggactatctgcaccggcccagctactgcgacgccgccttcgctctggagcagatttccaaggggaaggctactggccggaaagcgccgctgtggctgagagcgaagtttcagagactcttatttaaactgggttgttacattcaaaaaaactgcggcaagttcttggttgtgggcctcctcatatttggggccttcgcggtgggattaaaagcagcgaacctcgagaccaacgtggaggagctgtgggtggaagttggaggacgagtaagtcgtgaattaaattatactcgccagaagattggagaagaggctatgtttaatcctcaactcatgatacagacccctaaagaagaaggtgctaatgtcctgaccacagaagcgctcctacaacacctggactcggcactccaggccagccgtgtccatgtatacatgtacaacaggcagtggaaattggaacatttgtgttacaaatcaggagagcttatcacagaaacaggttacatggatcagataatagaatatctttacccttgtttgattattacacctttggactgcttctgggaaggggcgaaattacagtctgggacagcatacctcctaggtaaacctcctttgcggtggacaaacttcgaccctttggaattcctggaagagttaaagaaaataaactatcaagtggacagctgggaggaaatgctgaataaggctgaggttggtcatggttacatggaccgcccctgcctcaatccggccgatccagactgccccgccacagcccccaacaaaaattcaaccaaacctcttgatatggcccttgttttgaatggtggatgtcatggcttatccagaaagtatatgcactggcaggaggagttgattgtgggtggcacagtcaagaacagcactggaaaactcgtcagcgcccatgccctgcagaccatgttccagttaatgactcccaagcaaatgtacgagcacttcaaggggtacgagtatgtctcacacatcaactggaacgaggacaaagcggcagccatcctggaggcctggcagaggacatatgtggaggtggttcatcagagtgtcgcacagaactccactcaaaaggtgctttccttcaccaccacgaccctggacgacatcctgaaatccttctctgacgtcagtgtcatccgcgtggccagcggctacttactcatgctcgcctatgcctgtctaaccatgctgcgctgggactgctccaagtcccagggtgccgtggggctggctggcgtcctgctggttgcactgtcagtggctgcaggactgggcctgtgctcattgatcggaatttcctttaacgctgcaacaactcaggttttgccatttctcgctcttggtgttggtgtggatgatgtttttcttctggcccacgccttcagtgaaacaggacagaataaaagaatcccttttgaggacaggaccggggagtgcctgaagcgcacaggagccagcgtggccctcacgtccatcagcaatgtcacagccttcttcatggccgcgttaatcccaattcccgctctgcgggcgttctccctccaggcagcggtagtagtggtgttcaattttgccatggttctgctcatttttcctgcaattctcagcatggatttatatcgacgcgaggacaggagactggatattttctgctgttttacaagcccctgcgtcagcagagtgattcaggttgaacctcaggcctacaccgacacacacgacaatacccgctacagccccccacctccctacagcagccacagctttgcccatgaaacgcagattaccatgcagtccactgtccagctccgcacggagtacgacccccacacgcacgtgtactacaccaccgctgagccgcgctccgagatctctgtgcagcccgtcaccgtgacacaggacaccctcagctgccagagcccagagagcaccagctccacaagggacctgctctcccagttctccgactccagcctccactgcctcgagcccccctgtacgaagtggacactctcatcttttgctgagaagcactatgctcctttcctcttgaaaccaaaagccaaggtagtggtgatcttcctttttctgggcttgctgggggtcagcctttatggcaccacccgagtgagagacgggctggaccttacggacattgtacctcgggaaaccagagaatatgactttattgctgcacaattcaaatacttttctttctacaacatgtatatagtcacccagaaagcagactacccgaatatccagcacttactttacgacctacacaggagtttcagtaacgtgaagtatgtcatgttggaagaaaacaaacagcttcccaaaatgtggctgcactacttcagagactggcttcagggacttcaggatgcatttgacagtgactgggaaaccgggaaaatcatgccaaacaattacaagaatggatcagacgatggagtccttgcctacaaactcctggtgcaaaccggcagccgcgataagcccatcgacatcagccagttgactaaacagcgtctggtggatgcagatggcatcattaatcccagcgctttctacatctacctgacggcttgggtcagcaacgaccccgtcgcgtatgctgcctcccaggccaacatccggccacaccgaccagaatgggtccacgacaaagccgactacatgcctgaaacaaggctgagaatcccggcagcagagcccatcgagtatgcccagttccctttctacctcaacggcttgcgggacacctcagactttgtggaggcaattgaaaaagtaaggaccatctgcagcaactatacgagcctggggctgtccagttaccccaacggctaccccttcctcttctgggagcagtacatcggcctccgccactggctgctgctgttcatcagcgtggtgttggcctgcacattcctcgtgtgcgctgtcttccttctgaacccctggacggccgggatcattgtgatggtcctggcgctgatgacggtcgagctgttcggcatgatgggcctcatcggaatcaagctcagtgccgtgcccgtggtcatcctgatcgcttctgttggcataggagtggagttcaccgttcacgttgctttggcctttctgacggccatcggcgacaagaaccgcagggctgtgcttgccctggagcacatgtttgcacccgtcctggatggcgccgtgtccactctgctgggagtgctgatgctggcgggatctgagttcgacttcattgtcaggtatttctttgctgtgctggcgatcctcaccatcctcggcgttctcaatgggctggttttgcttcccgtgcttttgtctttctttggaccatatcctgaggtgtctccagccaacggcttgaaccgcctgcccacaccctcccctgagccaccccccagcgtggtccgcttcgccatgccgcccggccacacgcacagcgggtctgattcctccgactcggagtatagttcccagacgacagtgtcaggcctcagcgaggagcttcggcactacgaggcccagcagggcgcgggaggccctgcccaccaagtgatcgtggaagccacagaaaaccccgtcttcgcccactccactgtggtccatcccgaatccaggcatcacccaccctcgaacccgagacagcagccccacctggactcagggtccctgcctcccggacggcaaggccagcagccccgcagggacccccccagagaaggcttgtggccacccctctacagaccgcgcagagacgcttttgaaatttctactgaagggcattctggccctagcaatagggcccgctggggccctcgcggggcccgttctcacaaccctcggaacccagcgtccactgccatgggcagctccgtgcccggctactgccagcccatcaccactgtgacggcttctgcctccgtgactgtcgccgtgcacccgccgcctgtccctgggcctgggcggaacccccgagggggactctgcccaggctaccctgagactgaccacggcctgtttgaggacccccacgtgcctttccacgtccggtgtgagaggagggattcgaaggtggaagtcattgagctgcaggacgtggaatgcgaggagaggccccggggaagcagctccaactgagggtgattaaaatctgaagcaaagaggccaaagattggaaaccccccacccccacctctttccagaactgcttgaagagaactggttggagttatggaaaagatgccctgtgccaggacagcagttcattgttactgtaaccgattgtattattttgttaaatatttctataaatatttaagagatgtacacatgtgtaatataggaaggaaggatgtaaagtggtatgatctggggcttctccactcctgccccagagtgtggaggccacagtggggcctctccgtatttgtgcattgggctccgtgccacaaccaagcttcattagtcttaaatttcagcatatgttgctgctgcttaaatattgtataatttacttgtataattctatgcaaatattgcttatgtaataggattattttgtaaaggtttctgtttaaaatattttaaatttgcatatcacaaccctgtggtagtatgaaatgttactgttaactttcaaacacgctatgcgtgataatttttttgtttaatgagcagatatgaagaaagcacgttaatcctggtggcttctctaggtgtcgttgtgtgcggtcctcttgtttggctgtgcgtgtgaacacgtgtgtgagttcaccatgtactgtactgtgattttttttttgtcttgttttgtttctctacactgtctgtaacctgtagtaggctctgacctagtcaggctggaagcgtcaggatatcttttcttcgtgctggtgagggctggccctaaacatccacctaatcctttcaaatcagcccggcaaaagctagactctcctcgtgtctacggcatctcttatgatcattggctgccatccaggaccccaatttgtgcttcagggggataatctccttctctcggatcattgtgatggatgctggaacctcagggtatggagctcacatcagttcatcatggtgggtgttagagaattcggtgacatgcctagtgctgagccttggctgggccatgagagtctgtatactctaaaaagcatgcagcatggtgcccctcttctgaccaacacacacacgacccctcccccaacacccccaaattcaagagtggatgtggccctgtcacaggtagaaaaacctatttagttaattctttcttggcccacagtctcccagaaatgatgttttgagtccctatagtttaaactccctctcttaaatggagcagctggttgaggctttctagatctgtttgcatcttctttaaaactaagtggtgagcatgcattgtggtgtagaggcaggcattatgtaggataagagctccggggggattcttcatgcaccagtgtttagggtacgtgcttcctaagtaaatccaaacattgtctccatcctccccgtcattagtgctctttcaatgtgatgtgggaaagcaggaggatggacacaccccactgaaagatgtaggcaggggcaggtctctcaaccaggcatatttttaaaagttgcttctgtactggttctcttcttttgctctgaggtgtgggctccctcatctcgtaaccagagaccagcacatgtcagggaagcacccagtgtcggctccccatccaaatccacaccagcaccttgttacagacaagaagtcagaggaaagggcggggtccctgcagggctgaagcctaagctactgtgaggcgctcacgagtggcagctcctgttactcccttttaaattacctgggaaatcttaacagaaaggtaatgggcccccagaaatacccacagcatagtgacctcagaccctgatactcaccacaaaacttttaagatgctgattgggagccgcttgtggctgctgggtgtgtgtgtgtgtgtgtgcgtgcgtgcgtgtgtgtgtgtctctgctggggaccctggccacccccctgctgctgtcttggtgcctgtcacccacatggtctgccatcctaacacccagctctgctcagaaaacgtcctgcgtggaggagggatgatgcagaattctgaagtcgacttccctctggctcctggcgtgccctcgctcccttcctgagcccagctcgtgttgcgccggaggctgcgcggcccctgatttctgcatggtgtagaactttctccaatagtcacattggcaaagggagaactggggtgggcggggggtggggctggcagggaattagaatttctctctctcttttaatagttttattttgtctgtcctgtttgttcatttggatgttttaatttttaaaaaaaaaaaaaaaaaa

SEQ ID NO: 33 - DNA, 4740 bp, Homo sapiens
ttccggtttttctcaggggacgttgaaattatttttgtaacgggagtcgggagaggacggggcgtgccccgcgtgcgcgcgcgtcgtcctccccggcgctcctccacagctcgctggctcccgccgcggaaaggcgtcatgccgcccaaaaccccccgaaaaacggccgccaccgccgccgctgccgccgcggaacccccggcaccgccgccgccgccccctcctgaggaggacccagagcaggacagcggcccggaggacctgcctctcgtcaggcttgagtttgaagaaacagaagaacctgattttactgcattatgtcagaaattaaagataccagatcatgtcagagagagagcttggttaacttgggagaaagtttcatctgtggatggagtattgggaggttatattcaaaagaaaaaggaactgtggggaatctgtatctttattgcacgagttgacctagatgagatgtcgttcactttactgagctacagaaaaacatacgaaatcagtgtccataaattctttaacttactaaaagaaattgataccagtaccaaagttgataatgctatgtcaagactgttgaagaagtatgatgtattgtttgcactcttcagcaaattggaaaggacatgtgaacttatatatttgacacaacccagcagttcgatatctactgaaataaattctgcattggtgctaaaagtttcttggatcacatttttattagctaaaggggaagtattacaaatggaagatgatctggtgatttcatttcagttaatgctatgtgtccttgactattttattaaactctcacctcccatgttgctcaaagaaccatataaaacagctgttatacccattaatggttcacctcgaacacccaggcgaggtcagaacaggagtgcacggatagcaaaacaactagaaaatgatacaagaattattgaagttctctgtaaagaacatgaatgtaatatagatgaggtgaaaaatgtttatttcaaaaattttataccttttatgaattctcttggacttgtaacatctaatggacttccagaggttgaaaatctttctaaacgatacgaagaaatttatcttaaaaataaagatctagatcgaagattatttttggatcatgataaaactcttcagactgattctatagacagttttgaaacacagagaacaccacgaaaaagtaaccttgatgaagaggtgaatataattcctccacacactccagttaggactgttatgaacactatccaacaattaatgatgattttaaattctgcaagtgatcaaccttcagaaaatctgatttcctattttaacaactgcacagtgaatccaaaagaaagtatactgaaaagagtgaaggatataggatacatctttaaagagaaatttgctaaagctgtgggacagggttgtgtcgaaattggatcacagcgatacaaacttggagttcgcttgtattaccgagtaatggaatccatgcttaaatcagaagaagaacgattatccattcaaaattttagcaaacttctgaatgacaacatttttcatatgtctttattggcgtgcgctcttgaggttgtaatggccacatatagcagaagtacatctcagaatcttgattctggaacagatttgtctttcccatggattctgaatgtgcttaatttaaaagcctttgatttttacaaagtgatcgaaagttttatcaaagcagaaggcaacttgacaagagaaatgataaaacatttagaacgatgtgaacatcgaatcatggaatcccttgcatggctctcagattcacctttatttgatcttattaaacaatcaaaggaccgagaaggaccaactgatcaccttgaatctgcttgtcctcttaatcttcctctccagaataatcacactgcagcagatatgtatctttctcctgtaagatctccaaagaaaaaaggttcaactacgcgtgtaaattctactgcaaatgcagagacacaagcaacctcagccttccagacccagaagccattgaaatctacctctctttcactgttttataaaaaagtgtatcggctagcctatctccggctaaatacactttgtgaacgccttctgtctgagcacccagaattagaacatatcatctggacccttttccagcacaccctgcagaatgagtatgaactcatgagagacaggcatttggaccaaattatgatgtgttccatgtatggcatatgcaaagtgaagaatatagaccttaaattcaaaatcattgtaacagcatacaaggatcttcctcatgctgttcaggagacattcaaacgtgttttgatcaaagaagaggagtatgattctattatagtattctataactcggtcttcatgcagagactgaaaacaaatattttgcagtatgcttccaccaggccccctaccttgtcaccaatacctcacattcctcgaagcccttacaagtttcctagttcacccttacggattcctggagggaacatctatatttcacccctgaagagtccatataaaatttcagaaggtctgccaacaccaacaaaaatgactccaagatcaagaatcttagtatcaattggtgaatcattcgggacttctgagaagttccagaaaataaatcagatggtatgtaacagcgaccgtgtgctcaaaagaagtgctgaaggaagcaaccctcctaaaccactgaaaaaactacgctttgatattgaaggatcagatgaagcagatggaagtaaacatctcccaggagagtccaaatttcagcagaaactggcagaaatgacttctactcgaacacgaatgcaaaagcagaaaatgaatgatagcatggatacctcaaacaaggaagagaaatgaggatctcaggaccttggtggacactgtgtacacctctggattcattgtctctcacagatgtgactgtataactttcccaggttctgtttatggccacatttaatatcttcagctctttttgtggatataaaatgtgcagatgcaattgtttgggtgagtcctaagccacttgaaatgttagtcattgttatttatacaagattgaaaatcttgtgtaaatcctgccatttaaaaagttgtagcagattgtttcctcttccaaagtaaaattgctgtgctttatggatagtaagaatggccctagagtgggagtcctgataacccaggcctgtctgactactttgccttcttttgtagcatataggtgatgtttgctcttgtttttattaatttatatgtatatttttttaatttaacatgaacacccttagaaaatgtgtcctatctatcttccaaatgcaatttgattgactgcccattcaccaaaattatcctgaactcttctgcaaaaatggatattattagaaattagaaaaaaattactaattttacacattagattttattttactattggaatctgatatactgtgtgcttgttttataaaattttgcttttaattaaataaaagctggaagcaaagtataaccatatgatactatcatactactgaaacagatttcatacctcagaatgtaaaagaacttactgattattttcttcatccaacttatgtttttaaatgaggattattgatagtactcttggtttttataccattcagatcactgaatttataaagtacccatctagtacttgaaaaagtaaagtgttctgccagatcttaggtatagaggaccctaacacagtatatcccaagtgcactttctaatgtttctgggtcctgaagaattaagatacaaattaattttactccataaacagactgttaattataggagccttaatttttttttcatagagatttgtctaattgcatctcaaaattattctgccctccttaatttgggaaggtttgtgttttctctggaatggtacatgtcttccatgtatcttttgaactggcaattgtctatttatcttttatttttttaagtcagtatggtctaacactggcatgttcaaagccacattatttctagtccaaaattacaagtaatcaagggtcattatgggttaggcattaatgtttctatctgattttgtgcaaaagcttcaaattaaaacagctgcattagaaaaagaggcgcttctcccctcccctacacctaaaggtgtatttaaactatcttgtgtgattaacttatttagagatgctgtaacttaaaataggggatatttaaggtagcttcagctagcttttaggaaaatcactttgtctaactcagaattatttttaaaaagaaatctggtcttgttagaaaacaaaattttattttgtgctcatttaagtttcaaacttactattttgacagttattttgataacaatgacactagaaaacttgactccatttcatcattgtttctgcatgaatatcatacaaatcagttagtttttaggtcaagggcttactatttctgggtcttttgctactaagttcacattagaattagtgccagaattttaggaacttcagagatcgtgtattgagatttcttaaataatgcttcagatattattgctttattgcttttttgtattggttaaaactgtacatttaaaattgctatgttactattttctacaattaatagtttgtctattttaaaataaattagttgttaagagtc

SEQ ID NO: 34 - DNA, 4161 bp, Homo sapiens
ccgaagcagggcgcgcagcagcgctgagtgccccggaacgtgcgtcgcgcccccagtgtccgtcgcgtccgccgcgccccgggcggggatggggcggccagactgagcgccgcacccgccatccagacccgccggccctagccgcagtccctccagccgtggccccagcgcgcacgggcgatggcgaaggcgacgtccggtgccgcggggctgcgtctgctgttgctgctgctgctgccgctgctaggcaaagtggcattgggcctctacttctcgagggatgcttactgggagaagctgtatgtggaccaggcggccggcacgcccttgctgtacgtccatgccctgcgggacgcccctgaggaggtgcccagcttccgcctgggccagcatctctacggcacgtaccgcacacggctgcatgagaacaactggatctgcatccaggaggacaccggcctcctctaccttaaccggagcctggaccatagctcctgggagaagctcagtgtccgcaaccgcggctttcccctgctcaccgtctacctcaaggtcttcctgtcacccacatcccttcgtgagggcgagtgccagtggccaggctgtgcccgcgtatacttctccttcttcaacacctcctttccagcctgcagctccctcaagccccgggagctctgcttcccagagacaaggccctccttccgcattcgggagaaccgacccccaggcaccttccaccagttccgcctgctgcctgtgcagttcttgtgccccaacatcagcgtggcctacaggctcctggagggtgagggtctgcccttccgctgcgccccggacagcctggaggtgagcacgcgctgggccctggaccgcgagcagcgggagaagtacgagctggtggccgtgtgcaccgtgcacgccggcgcgcgcgaggaggtggtgatggtgcccttcccggtgaccgtgtacgacgaggacgactcggcgcccaccttccccgcgggcgtcgacaccgccagcgccgtggtggagttcaagcggaaggaggacaccgtggtggccacgctgcgtgtcttcgatgcagacgtggtacctgcatcaggggagctggtgaggcggtacacaagcacgctgctccccggggacacctgggcccagcagaccttccgggtggaacactggcccaacgagacctcggtccaggccaacggcagcttcgtgcgggcgaccgtacatgactataggctggttctcaaccggaacctctccatctcggagaaccgcaccatgcagctggcggtgctggtcaatgactcagacttccagggcccaggagcgggcgtcctcttgctccacttcaacgtgtcggtgctgccggtcagcctgcacctgcccagtacctactccctctccgtgagcaggagggctcgccgatttgcccagatcgggaaagtctgtgtggaaaactgccaggcattcagtggcatcaacgtccagtacaagctgcattcctctggtgccaactgcagcacgctaggggtggtcacctcagccgaggacacctcggggatcctgtttgtgaatgacaccaaggccctgcggcggcccaagtgtgccgaacttcactacatggtggtggccaccgaccagcagacctctaggcaggcccaggcccagctgcttgtaacagtggaggggtcatatgtggccgaggaggcgggctgccccctgtcctgtgcagtcagcaagagacggctggagtgtgaggagtgtggcggcctgggctccccaacaggcaggtgtgagtggaggcaaggagatggcaaagggatcaccaggaacttctccacctgctctcccagcaccaagacctgccccgacggccactgcgatgttgtggagacccaagacatcaacatttgccctcaggactgcctccggggcagcattgttgggggacacgagcctggggagccccgggggattaaagctggctatggcacctgcaactgcttccctgaggaggagaagtgcttctgcgagcccgaagacatccaggatccactgtgcgacgagctgtgccgcacggtgatcgcagccgctgtcctcttctccttcatcgtctcggtgctgctgtctgccttctgcatccactgctaccacaagtttgcccacaagccacccatctcctcagctgagatgaccttccggaggcccgcccaggccttcccggtcagctactcctcttccggtgcccgccggccctcgctggactccatggagaaccaggtctccgtggatgccttcaagatcctggaggatccaaagtgggaattccctcggaagaacttggttcttggaaaaactctaggagaaggcgaatttggaaaagtggtcaaggcaacggccttccatctgaaaggcagagcagggtacaccacggtggccgtgaagatgctgaaagagaacgcctccccgagtgagctgcgagacctgctgtcagagttcaacgtcctgaagcaggtcaaccacccacatgtcatcaaattgtatggggcctgcagccaggatggcccgctcctcctcatcgtggagtacgccaaatacggctccctgcggggcttcctccgcgagagccgcaaagtggggcctggctacctgggcagtggaggcagccgcaactccagctccctggaccacccggatgagcgggccctcaccatgggcgacctcatctcatttgcctggcagatctcacaggggatgcagtatctggccgagatgaagctcgttcatcgggacttggcagccagaaacatcctggtagctgaggggcggaagatgaagatttcggatttcggcttgtcccgagatgtttatgaagaggattcctacgtgaagaggagccagggtcggattccagttaaatggatggcaattgaatccctttttgatcatatctacaccacgcaaagtgatgtatggtcttttggtgtcctgctgtgggagatcgtgaccctagggggaaacccctatcctgggattcctcctgagcggctcttcaaccttctgaagaccggccaccggatggagaggccagacaactgcagcgaggagatgtaccgcctgatgctgcaatgctggaagcaggagccggacaaaaggccggtgtttgcggacatcagcaaagacctggagaagatgatggttaagaggagagactacttggaccttgcggcgtccactccatctgactccctgatttatgacgacggcctctcagaggaggagacaccgctggtggactgtaataatgcccccctccctcgagccctcccttccacatggattgaaaacaaactctatggtagaatttcccatgcatttactagattctagcaccgctgtcccctctgcactatccttcctctctgtgatgctttttaaaaatgtttctggtctgaacaaaaccaaagtctgctctgaacctttttatttgtaaatgtctgactttgcatccagtttacatttaggcattattgcaactatgtttttctaaaaggaagtgaaaataagtgtaattaccacattgcccagcaacttaggatggtagaggaaaaaacagatcagggcggaactctcaggggagaccaagaacaggttgaataaggcgcttctggggtgggaatcaagtcatagtacttctactttaactaagtggataaatatacaaatctggggaggtattcagttgagaaaggagccaccagcaccactcagcctgcactgggagcacagccaggttcccccagacccctcctgggcaggcaggtgcctctcagaggccacccggcactggcgagcagccactggccaagcctcagccccagtcccagccacatgtcctccatcaggggtagcgaggttgcaggagctggctggccctgggaggacgcacccccactgctgttttcacatcctttcccttacccaccttcaggacggttgtcacttatgaagtcagtgctaaagctggagcagttgctttttgaaagaacatggtctgtggtgctgtggtcttacaatggacagtaaatatggttcttgccaaaactccttcttttgtctttgattaaatactagaaatttaaaaaaaaaaaa

SEQ ID NO: 35 - DNA, 2346 bp, Homo sapiens
acaaggcagcctcgctcgagcgcaggccaatcggctttctagctagagggtttaactcctatttaaaaagaagaacctttgaattctaacggctgagctcttggaagacttgggtccttgggtcgcaggtgggagccgacgggtgggtagaccgtgggggatatctcagtggcggacgaggacggcggggacaaggggcggctggtcggagtggcggagcgtcaagtcccctgtcggttcctccgtccctgagtgtccttggcgctgccttgtgcccgcccagcgcctttgcatccgctcctgggcaccgaggcgccctgtaggatactgcttgttacttattacagctagaggcatcatggaccgatctaaagaaaactgcatttcaggacctgttaaggctacagctccagttggaggtccaaaacgtgttctcgtgactcagcaatttccttgtcagaatccattacctgtaaatagtggccaggctcagcgggtcttgtgtccttcaaattcttcccagcgcattcctttgcaagcacaaaagcttgtctccagtcacaagccggttcagaatcagaagcagaagcaattgcaggcaaccagtgtacctcatcctgtctccaggccactgaataacacccaaaagagcaagcagcccctgccatcggcacctgaaaataatcctgaggaggaactggcatcaaaacagaaaaatgaagaatcaaaaaagaggcagtgggctttggaagactttgaaattggtcgccctctgggtaaaggaaagtttggtaatgtttatttggcaagagaaaagcaaagcaagtttattctggctcttaaagtgttatttaaagctcagctggagaaagccggagtggagcatcagctcagaagagaagtagaaatacagtcccaccttcggcatcctaatattcttagactgtatggttatttccatgatgctaccagagtctacctaattctggaatatgcaccacttggaacagtttatagagaacttcagaaactttcaaagtttgatgagcagagaactgctacttatataacagaattggcaaatgccctgtcttactgtcattcgaagagagttattcatagagacattaagccagagaacttacttcttggatcagctggagagcttaaaattgcagattttgggtggtcagtacatgctccatcttccaggaggaccactctctgtggcaccctggactacctgccccctgaaatgattgaaggtcggatgcatgatgagaaggtggatctctggagccttggagttctttgctatgaatttttagttgggaagcctccttttgaggcaaacacataccaagagacctacaaaagaatatcacgggttgaattcacattccctgactttgtaacagagggagccagggacctcatttcaagactgttgaagcataatcccagccagaggccaatgctcagagaagtacttgaacacccctggatcacagcaaattcatcaaaaccatcaaattgccaaaacaaagaatcagctagcaaacagtcttaggaatcgtgcagggggagaaatccttgagccagggctgccatataacctgacaggaacatgctactgaagtttattttaccattgactgctgccctcaatctagaacgctacacaagaaatatttgttttactcagcaggtgtgccttaacctccctattcagaaagctccacatcaataaacatgacactctgaagtgaaagtagccacgagaattgtgctacttatactggttcataatctggaggcaaggttcgactgcagccgccccgtcagcctgtgctaggcatggtgtcttcacaggaggcaaatccagagcctggctgtggggaaagtgaccactctgccctgaccccgatcagttaaggagctgtgcaataaccttcctagtacctgagtgagtgtgtaacttattgggttggcgaagcctggtaaagctgttggaatgagtatgtgattctttttaagtatgaaaataaagatatatgtacagacttgtattttttctctggtggcattcctttaggaatgctgtgtgtctgtccggcaccccggtaggcctgattgggtttctagtcctccttaaccacttatctcccatatgagagtgtgaaaaataggaacacgtgctctacctccatttagggatttgcttgggatacagaagaggccatgtgtctcagagctgttaagggcttatttttttaaaacattggagtcatagcatgtgtgtaaactttaaatatgcaaataaataagtatctatgtctaaaaaaa

SEQ ID NO: 36 - DNA, 2090 bp, Homo sapiens
gttggcgaggagtttcctgtttcccccgcagcgctgagttgaagttgagtgagtcactcgcgcgcacggagcgacgacacccccgcgcgtgcacccgctcgggacaggagccggactcctgtgcagcttccctcggccgccgggggcctccccgcgcctcgccggcctccaggcccctcctggctggcgagcgggcgccacatctggcccgcacatctgcgctgccggcccggcgcggggtccggagagggcgcggcgcggagcgcagccaggggtccgggaaggcgccgtccgtgcgctgggggctcggtctatgacgagcagcggggtctgccatgggtcgggggctgctcaggggcctgtggccgctgcacatcgtcctgtggacgcgtatcgccagcacgatcccaccgcacgttcagaagtcggttaataacgacatgatagtcactgacaacaacggtgcagtcaagtttccacaactgtgtaaattttgtgatgtgagattttccacctgtgacaaccagaaatcctgcatgagcaactgcagcatcacctccatctgtgagaagccacaggaagtctgtgtggctgtatggagaaagaatgacgagaacataacactagagacagtttgccatgaccccaagctcccctaccatgactttattctggaagatgctgcttctccaaagtgcattatgaaggaaaaaaaaaagcctggtgagactttcttcatgtgttcctgtagctctgatgagtgcaatgacaacatcatcttctcagaagaatataacaccagcaatcctgacttgttgctagtcatatttcaagtgacaggcatcagcctcctgccaccactgggagttgccatatctgtcatcatcatcttctactgctaccgcgttaaccggcagcagaagctgagttcaacctgggaaaccggcaagacgcggaagctcatggagttcagcgagcactgtgccatcatcctggaagatgaccgctctgacatcagctccacgtgtgccaacaacatcaaccacaacacagagctgctgcccattgagctggacaccctggtggggaaaggtcgctttgctgaggtctataaggccaagctgaagcagaacacttcagagcagtttgagacagtggcagtcaagatctttccctatgaggagtatgcctcttggaagacagagaaggacatcttctcagacatcaatctgaagcatgagaacatactccagttcctgacggctgaggagcggaagacggagttggggaaacaatactggctgatcaccgccttccacgccaagggcaacctacaggagtacctgacgcggcatgtcatcagctgggaggacctgcgcaagctgggcagctccctcgcccgggggattgctcacctccacagtgatcacactccatgtgggaggcccaagatgcccatcgtgcacagggacctcaagagctccaatatcctcgtgaagaacgacctaacctgctgcctgtgtgactttgggctttccctgcgtctggaccctactctgtctgtggatgacctggctaacagtgggcaggtgggaactgcaagatacatggctccagaagtcctagaatccaggatgaatttggagaatgctgagtccttcaagcagaccgatgtctactccatggctctggtgctctgggaaatgacatctcgctgtaatgcagtgggagaagtaaaagattatgagcctccatttggttccaaggtgcgggagcacccctgtgtcgaaagcatgaaggacaacgtgttgagagatcgagggcgaccagaaattcccagcttctggctcaaccaccagggcatccagatggtgtgtgagacgttgactgagtgctgggaccacgacccagaggcccgtctcacagcccagtgtgtggcagaacgcttcagtgagctggagcatctggacaggctctcggggaggagctgctcggaggagaagattcctgaagacggctccctaaacactaccaaatagctcttatggggcaggctgggcatgtccaaagaggctgcccctctcaccaaa

SEQ ID NO: 37 - DNA, 2629 bp, Homo sapiens
acttgtcatggcgactgtccagctttgtgccaggagcctcgcaggggttgatgggattggggttttcccctcccatgtgctcaagactggcgctaaaagttttgagcttctcaaaagtctagagccaccgtccagggagcaggtagctgctgggctccggggacactttgcgttcgggctgggagcgtgctttccacgacggtgacacgcttccctggattggcagccagactgccttccgggtcactgccatggaggagccgcagtcagatcctagcgtcgagccccctctgagtcaggaaacattttcagacctatggaaactacttcctgaaaacaacgttctgtcccccttgccgtcccaagcaatggatgatttgatgctgtccccggacgatattgaacaatggttcactgaagacccaggtccagatgaagctcccagaatgccagaggctgctccccgcgtggcccctgcaccagcagctcctacaccggcggcccctgcaccagccccctcctggcccctgtcatcttctgtcccttcccagaaaacctaccagggcagctacggtttccgtctgggcttcttgcattctgggacagccaagtctgtgacttgcacgtactcccctgccctcaacaagatgttttgccaactggccaagacctgccctgtgcagctgtgggttgattccacacccccgcccggcacccgcgtccgcgccatggccatctacaagcagtcacagcacatgacggaggttgtgaggcgctgcccccaccatgagcgctgctcagatagcgatggtctggcccctcctcagcatcttatccgagtggaaggaaatttgcgtgtggagtatttggatgacagaaacacttttcgacatagtgtggtggtgccctatgagccgcctgaggttggctctgactgtaccaccatccactacaactacatgtgtaacagttcctgcatgggcggcatgaaccggaggcccatcctcaccatcatcacactggaagactccagtggtaatctactgggacggaacagctttgaggtgcgtgtttgtgcctgtcctgggagagaccggcgcacagaggaagagaatctccgcaagaaaggggagcctcaccacgagctgcccccagggagcactaagcgagcactgcccaacaacaccagctcctctccccagccaaagaagaaaccactggatggagaatatttcacccttcagatccgtgggcgtgagcgcttcgagatgttccgagagctgaatgaggccttggaactcaaggatgcccaggctgggaaggagccaggggggagcagggctcactccagccacctgaagtccaaaaagggtcagtctacctcccgccataaaaaactcatgttcaagacagaagggcctgactcagactgacattctccacttcttgttccccactgacagcctcccacccccatctctccctcccctgccattttgggttttgggtctttgaacccttgcttgcaataggtgtgcgtcagaagcacccaggacttccatttgctttgtcccggggctccactgaacaagttggcctgcactggtgttttgttgtggggaggaggatggggagtaggacataccagcttagattttaaggtttttactgtgagggatgtttgggagatgtaagaaatgttcttgcagttaagggttagtttacaatcagccacattctaggtaggtaggggcccacttcaccgtactaaccagggaagctgtccctcatgttgaattttctctaacttcaaggcccatatctgtgaaatgctggcatttgcacctacctcacagagtgcattgtgagggttaatgaaataatgtacatctggccttgaaaccaccttttattacatggggtctaaaacttgacccccttgagggtgcctgttccctctccctctccctgttggctggtgggttggtagtttctacagttgggcagctggttaggtagagggagttgtcaagtcttgctggcccagccaaaccctgtctgacaacctcttggtcgaccttagtacctaaaaggaaatctcaccccatcccacaccctggaggatttcatctcttgtatatgatgatctggatccaccaagacttgttttatgctcagggtcaatttcttttttcttttttttttttttttttctttttctttgagactgggtctcgctttgttgcccaggctggagtggagtggcgtgatcttggcttactgcagcctttgcctccccggctcgagcagtcctgcctcagcctccggagtagctgggaccacaggttcatgccaccatggccagccaacttttgcatgttttgtagagatggggtctcacagtgttgcccaggctggtctcaaactcctgggctcaggcgatccacctgtctcagcctcccagagtgctgggattacaattgtgagccaccacgtggagctggaagggtcaacatcttttacattctgcaagcacatctgcattttcaccccacccttcccctccttctccctttttatatcccatttttatatcgatctcttattttacaataaaactttgctgcca

SEQ ID NO: 38 - protein, 1130 aa, Homo sapiens
MLEICLKLVGCKSKKGLSSSSSCYLEEALQRPVASDFEPQGLSEAARWNSKENLLAGPSENDPNLFVALYDFVASGDNTLSITKGEKLRVLGYNHNGEWCEAQTKNGQGWVPSNYITPVNSLEKHSWYHGPVSRNAAEYLLSSGINGSFLVRESESSPGQRSISLRYEGRVYHYRINTASDGKLYVSSESRFNTLAELVHHHSTVADGLITTLHYPAPKRNKPTVYGVSPNYDKWEMERTDITMKHKLGGGQYGEVYEGVWKKYSLTVAVKTLKEDTMEVEEFLKEAAVMKEIKHPNLVQLLGVCTREPPFYIITEFMTYGNLLDYLRECNRQEVNAVVLLYMATQISSAMEYLEKKNFIHRDLAARNCLVGENHLVKVADFGLSRLMTGDTYTAHAGAKFPIKWTAPESLAYNKFSIKSDVWAFGVLLWEIATYGMSPYPGIDLSQVYELLEKDYRMERPEGCPEKVYELMRACWQWNPSDRPSFAEIHQAFETMFQESSISDEVEKELGKQGVRGAVSTLLQAPELPTKTRTSRRAAEHRDTTDVPEMPHSKGQGESDPLDHEPAVSPLLPRKERGPPEGGLNEDERLLPKDKKTNLFSALIKKKKKTAPTPPKRSSSFREMDGQPERRGAGEEEGRDISNGALAFTPLDTADPAKSPKPSNGAGVPNGALRESGGSGFRSPHLWKKSSTLTSSRLATGEEEGGGSSSKRFLRSCSASCVPHGAKDTEWRSVTLPRDLQSTGRQFDSSTFGGHKSEKPALPRKRAGENRSDQVTRGTVTPPPRLVKKNEEAADEVFKDIMESSPGSSPPNLTPKPLRRQVTVAPASGLPHKEEAGKGSALGTPAAAEPVTPTSKAGSGAPGGTSKGPAEESRVRRHKHSSESPGRDKGKLSRLKPAPPPPPAASAGKAGGKPSQSPSQEAAGEAVLGAKTKATSLVDAVNSDAAKPSQPGEGLKKPVLPATPKPQSAKPSGTPISPAPVPSTLPSASSALAGDQPSSTAFIPLISTRVSLRKTRQPPERIASGAITKGVVLDSTEALCLAISRNSEQMASHSAVLEAGKNLYTFCVSYVDSIQQMRNKFAFREAINKLENNLRELQICPATAGSGPAATQDFSKLLSSVKEISDIVQR

SEQ ID NO: 39 - protein, 2843 aa, Homo sapiens
MAAASYDQLLKQVEALKMENSNLRQELEDNSNHLTKLETEASNMKEVLKQLQGSIEDEAMASSGQIDLLERLKELNLDSSNFPGVKLRSKMSLRSYGSREGSVSSRSGECSPVPMGSFPRRGFVNGSRESTGYLEELEKERSLLLADLDKEEKEKDWYYAQLQNLTKRIDSLPLTENFSLQTDMTRRQLEYEARQIRVAMEEQLGTCQDMEKRAQRRIARIQQIEKDILRIRQLLQSQATEAERSSQNKHETGSHDAERQNEGQGVGEINMATSGNGQGSTTRMDHETASVLSSSSTHSAPRRLTSHLGTKVEMVYSLLSMLGTHDKDDMSRTLLAMSSSQDSCISMRQSGCLPLLIQLLHGNDKDSVLLGNSRGSKEARARASAALHNIIHSQPDDKRGRREIRVLHLLEQIRAYCETCWEWQEAHEPGMDQDKNPMPAPVEHQICPAVCVLMKLSFDEEHRHAMNELGGLQAIAELLQVDCEMYGLTNDHYSITLRRYAGMALTNLTFGDVANKATLCSMKGCMRALVAQLKSESEDLQQVIASVLRNLSWRADVNSKKTLREVGSVKALMECALEVKKESTLKSVLSALWNLSAHCTENKADICAVDGALAFLVGTLTYRSQTNTLAIIESGGGILRNVSSLIATNEDHRQILRENNCLQTLLQHLKSHSLTIVSNACGTLWNLSARNPKDQEALWDMGAVSMLKNLIHSKHKMIAMGSAAALRNLMANRPAKYKDANIMSPGSSLPSLHVRKQKALEAELDAQHLSETFDNIDNLSPKASHRSKQRHKQSLYGDYVFDTNRHDDNRSDNFNTGNMTVLSPYLNTTVLPSSSSSRGSLDSSRSEKDRSLERERGIGLGNYHPATENPGTSSKRGLQISTTAAQIAKVMEEVSAIHTSQEDRSSGSTTELHCVTDERNALRRSSAAHTHSNTYNFTKSENSNRTCSMPYAKLEYKRSSNDSLNSVSSSDGYGKRGQMKPSIESYSEDDESKFCSYGQYPADLAHKIHSANHMDDNDGELDTPINYSLKYSDEQLNSGRQSPSQNERWARPKHIIEDEIKQSEQRQSRNQSTTYPVYTESTDDKHLKFQPHFGQQECVSPYRSRGANGSETNRVGSNHGINQNVSQSLCQEDDYEDDKPTNYSERYSEEEQHEEEERPTNYSIKYNEEKRHVDQPIDYSLKYATDIPSSQKQSFSFSKSSSGQSSKTEHMSSSSENTSTPSSNAKRQNQLHPSSAQSRSGQPQKAATCKVSSINQETIQTYCVEDTPICFSRCSSLSSLSSAEDEIGCNQTTQEADSANTLQIAEIKEKIGTRSAEDPVSEVPAVSQHPRTKSSRLQGSSLSSESARHKAVEFSSGAKSPSKSGAQTPKSPPEHYVQETPLMFSRCTSVSSLDSFESRSIASSVQSEPCSGMVSGIISPSDLPDSPGQTMPPSRSKTPPPPPQTAQTKREVPKNKAPTAEKRESGPKQAAVNAAVQRVQVLPDADTLLHFATESTPDGFSCSSSLSALSLDEPFIQKDVELRIMPPVQENDNGNETESEQPKESNENQEKEAEKTIDSEKDLLDDSDDDDIEILEECIISAMPTKSSRKAKKPAQTASKLPPPVARKPSQLPVYKLLPSQNRLQPQKHVSFTPGDDMPRVYCVEGTPINFSTATSLSDLTIESPPNELAAGEGVRGGAQSGEFEKRDTIPTEGRSTDEAQGGKTSSVTIPELDDNKAEEGDILAECINSAMPKGKSHKPFRVKKIMDQVQQASASSSAPNKNQLDGKKKKPTSPVKPIPQNTEYRTRVRKNADSKNNLNAERVFSDNKDSKKQNLKNNSKVFNDKLPNNEDRVRGSFAFDSPHHYTPIEGTPYCFSRNDSLSSLDFDDDDVDLSREKAELRKAKENKESEAKVTSHTELTSNQQSANKTQAIAKQPINRGQPKPILQKQSTFPQSSKDIPDRGAATDEKLQNFAIENTPVCFSHNSSLSSLSDIDQENNNKENEPIKETEPPDSQGEPSKPQASGYAPKSFHVEDTPVCFSRNSSLSSLSIDSEDDLLQECISSAMPKKKKPSRLKGDNEKHSPRNMGGILGEDLTLDLKDIQRPDSEHGLSPDSENFDWKAIQEGANSIVSSLHQAAAAACLSRQASSDSDSILSLKSGISLGSPFHLTPDQEEKPFTSNKGPRILKPGEKSTLETKKIESESKGIKGGKKVYKSLITGKVRSNSEISGQMKQPLQANMPSISRGRTMIHIPGVRNSSSSTSPVSKKGPPLKTPASKSPSEGQTATTSPRGAKPSVKSELSPVARQTSQIGGSSKAPSRSGSRDSTPSRPAQQPLSRPIQSPGRNSISPGRNGISPPNKLSQLPRTSSPSTASTKSSGSGKMSYTSPGRQMSQQNLTKQTGLSKNASSIPRSESASKGLNQMNNGNGANKKVELSRMSSTKSSGSESDRSERPVLVRQSTFIKEAPSPTLRRKLEESASFESLSPSSRPASPTRSQAQTPVLSPSLPDMSLSTHSSVQAGGWRKLPPNLSPTIEYNDGRPAKRHDIARSHSESPSRLPINRSGTWKREHSKHSSSLPRVSTWRRTGSSSSILSASSESSEKAKSEDEKHVNSISGTKQSKENQVSAKGTWRKIKENEFSPTNSTSQTVSSGATNGAESKTLIYQMAPAVSKTEDVWVRIEDCPINNPRSGRSPTGNTPPVIDSVSEKANPNIKDSKDNQAKQNVGNGSVPMRTVGLENRLNSFIQVDAPDQKGTEIKPGQNNPVPVSETNESSIVERTPFSSSSSSKHSSPSGTVAARVTPFNYNPSPRKSSADSTSARPSQIPTPVNNNTKKRDSKTDSTESSGTQSPKRHSGSYLVTSV

SEQ ID NO: 40 - protein, 3056 aa, Homo sapiens
MSLVLNDLLICCRQLEHDRATERKKEVEKFKRLIRDPETIKHLDRHSDSKQGKYLNWDAVFRFLQKYIQKETECLRIAKPNVSASTQASRQKKMQEISSLVKYFIKCANRRAPRLKCQELLNYIMDTVKDSSNGAIYGADCSNILLKDILSVRKYWCEISQQQWLELFSVYFRLYLKPSQDVHRVLVARIIHAVTKGCCSQTDGLNSKFLDFFSKAIQCARQEKSSSGLNHILAALTIFLKTLAVNFRIRVCELGDEILPTLLYIWTQHRLNDSLKEVIIELFQLQIYIHHPKGAKTQEKGAYESTKWRSILYNLYDLLVNEISHIGSRGKYSSGFRNIAVKENLIELMADICHQVFNEDTRSLEISQSYTTTQRESSDYSVPCKRKKIELGWEVIKDHLQKSQNDFDLVPWLQIATQLISKYPASLPNCELSPLLMILSQLLPQQRHGERTPYVLRCLTEVALCQDKRSNLESSQKSDLLKLWNKIWCITFRGISSEQIQAENFGLLGAIIQGSLVEVDREFWKLFTGSACRPSCPAVCCLTLALTTSIVPGTVKMGIEQNMCEVNRSFSLKESIMKWLLFYQLEGDLENSTEVPPILHSNFPHLVLEKILVSLTMKNCKAAMNFFQSVPECEHHQKDKEELSFSEVEELFLQTTFDKMDFLTIVRECGIEKHQSSIGFSVHQNLKESLDRCLLGLSEQLLNNYSSEITNSETLVRCSRLLVGVLGCYCYMGVIAEEEAYKSELFQKAKSLMQCAGESITLFKNKTNEEFRIGSLRNMMQLCTRCLSNCTKKSPNKIASGFFLRLLTSKLMNDIADICKSLASFIKKPFDRGEVESMEDDTNGNLMEVEDQSSMNLFNDYPDSSVSDANEPGESQSTIGAINPLAEEYLSKQDLLFLDMLKFLCLCVTTAQTNTVSFRAADIRRKLLMLIDSSTLEPTKSLHLHMYLMLLKELPGEEYPLPMEDVLELLKPLSNVCSLYRRDQDVCKTILNHVLHVVKNLGQSNMDSENTRDAQGQFLTVIGAFWHLTKERKYIFSVRMALVNCLKTLLEADPYSKWAILNVMGKDFPVNEVFTQFLADNHHQVRMLAAESINRLFQDTKGDSSRLLKALPLKLQQTAFENAYLKAQEGMREMSHSAENPETLDEIYNRKSVLLTLIAVVLSCSPICEKQALFALCKSVKENGLEPHLVKKVLEKVSETFGYRRLEDFMASHLDYLVLEWLNLQDTEYNLSSFPFILLNYTNIEDFYRSCYKVLIPHLVIRSHFDEVKSIANQIQEDWKSLLTDCFPKILVNILPYFAYEGTRDSGMAQQRETATKVYDMLKSENLLGKQIDHLFISNLPEIVVELLMTLHEPANSSASQSTDLCDFSGDLDPAPNPPHFPSHVIKATFAYISNCHKTKLKSILEILSKSPDSYQKILLAICEQAAETNNVYKKHRILKIYHLFVSLLLKDIKSGLGGAWAFVLRDVIYTLIHYINQRPSCIMDVSLRSFSLCCDLLSQVCQTAVTYCKDALENHLHVIVGTLIPLVYEQVEVQKQVLDLLKYLVIDNKDNENLYITIKLLDPFPDHVVFKDLRITQQKIKYSRGPFSLLEEINHFLSVSVYDALPLTRLEGLKDLRRQLELHKDQMVDIMRASQDNPQDGIMVKLVVNLLQLSKMAINHTGEKEVLEAVGSCLGEVGPIDFSTIAIQHSKDASYTKALKLFEDKELQWTFIMLTYLNNTLVEDCVKVRSAAVTCLKNILATKTGHSFWEIYKMTTDPMLAYLQPFRTSRKKFLEVPRFDKENPFEGLDDINLWIPLSENHDIWIKTLTCAFLDSGGTKCEILQLLKPMCEVKTDFCQTVLPYLIHDILLQDTNESWRNLLSTHVQGFFTSCLRHFSQTSRSTTPANLDSESEHFFRCCLDKKSQRTMLAVVDYMRRQKRPSSGTIFNDAFWLDLNYLEVAKVAQSCAAHFTALLYAEIYADKKSMDDQEKRSLAFEEGSQNTTISSLSEKSKEETGISLQDLLLEIYRSIGEPDSLYGCGGGKMLQPITRLRTYEHEAMWGKALVTYDLETAIPSSTRQAGIIQALQNLGLCHILSVYLKGLDYENKDWCPELEELHYQAAWRNMQWDHCTSVSKEVEGTSYHESLYNALQSLRDREFSTFYESLKYARVKEVEEMCKRSLESVYSLYPTLSRLQAIGELESIGELFSRSVTHRQLSEVYIKWQKHSQLLKDSDFSFQEPIMALRTVILEILMEKEMDNSQRECIKDILTKHLVELSILARTFKNTQLPERAIFQIKQYNSVSCGVSEWQLEEAQVFWAKKEQSLALSILKQMIKKLDASCAANNPSLKLTYTECLRVCGNWLAETCLENPAVIMQTYLEKAVEVAGNYDGESSDELRNGKMKAFLSLARFSDTQYQRIENYMKSSEFENKQALLKRAKEEVGLLREHKIQTNRYTVKVQRELELDELALRALKEDRKRFLCKAVENYINCLLSGEEHDMWVFRLCSLWLENSGVSEVNGMMKANGMKIPTYKFLPLMYQLAARMGTKMMGGLGFHEVLNNLISRISMDHPHHTLFIILALANANRDEFLTKPEVARRSRITKNVPKQSSQLDEDRTEAANRIICTIRSRRPQMVRSVEALCDAYIILANLDATQWKTQRKGINIPADQPITKLKNLEDVVVPTMEIKVDHTGEYGNLVTIQSFKAEFRLAGGVNLPKIIDCVGSDGKERRQLVKGRDDLRQDAVMQQVFQMCNTLLQRNTETRKRKLTICTYKVVPLSQRSGVLEWCTGTVPIGEFLVNNEDGAHKRYRPNDFSAFQCQKKMMEVQKKSFEEKYEVFMDVCQNFQPVFRYFCMEKFLDPAIWFEKRLAYTRSVATSSIVGYILGLGDRHVQNILINEQSAELVHIDLGVAFEQGKILPTPETVPFRLTRDIVDGMGITGVEGVFRRCCEKTMEVMRNSQETLLTIVEVLLYDPLFDWTMNPLKALYLQQRPEDETELHPTLNADDQECKRNLSDIDQSFNKVAERVLMRLQEKLKGVEEGTVLSVGGQVNLLIQQAIDPKNLSRLFPGWKAWV

SEQ ID NO: 41 - protein, 2644 aa, Homo sapiens
MGEHGLELASMIPALRELGSATPEEYNTVVQKPRQILCQFIDRILTDVNVVAVELVKKTDSQPTSVMLLDFIQHIMKSSPLMFVNVSGSHEAKGSCIEFSNWIITRLLRIAATPSCHLLHKKICEVICSLLFLFKSKSPAIFGVLTKELLQLFEDLVYLHRRNVMGHAVEWPVVMSRFLSQLDEHMGYLQSAPLQLMSMQNLEFIEVTLLMVLTRIIAIVFFRRQELLLWQIGCVLLEYGSPKIKSLAISFLTELFQLGGLPAQPASTFFSSFLELLKHLVEMDTDQLKLYEEPLSKLIKTLFPFEAEAYRNIEPVYLNMLLEKLCVMFEDGVLMRLKSDLLKAALCHLLQYFLKFVPAGYESALQVRKVYVRNICKALLDVLGIEVDAEYLLGPLYAALKMESMEIIEEIQCQTQQENLSSNSDGISPKRRRLSSSLNPSKRAPKQTEEIKHVDMNQKSILWSALKQKAESLQISLEYSGLKNPVIEMLEGIAVVLQLTALCTVHCSHQNMNCRTFKDCQHKSKKKPSVVITWMSLDFYTKVLKSCRSLLESVQKLDLEATIDKVVKIYDALIYMQVNSSFEDHILEDLCGMLSLPWIYSHSDDGCLKLTTFAANLLTLSCRISDSYSPQAQSRCVFLLTLFPRRIFLEWRTAVYNWALQSSHEVIRASCVSGFFILLQQQNSCNRVPKILIDKVKDDSDIVKKEFASILGQLVCTLHGMFYLTSSLTEPFSEHGHVDLFCRNLKATSQHECSSSQLKASVCKPFLFLLKKKIPSPVKLAFIDNLHHLCKHLDFREDETDVKAVLGTLLNLMEDPDKDVRVAFSGNIKHILESLDSEDGFIKELFVLRMKEAYTHAQISRNNELKDTLILTTGDIGRAAKGDLVPFALLHLLHCLLSKSASVSGAAYTEIRALVAAKSVKLQSFFSQYKKPICQFLVESLHSSQMTALPNTPCQNADVRKQDVAHQREMALNTLSEIANVFDFPDLNRFLTRTLQVLLPDLAAKASPAASALIRTLGKQLNVNRREILINNFKYIFSHLVCSCSKDELERALHYLKNETEIELGSLLRQDFQGLHNELLLRIGEHYQQVFNGLSILASFASSDDPYQGPRDIISPELMADYLQPKLLGILAFFNMQLLSSSVGIEDKKMALNSLMSLMKLMGPKHVSSVRVKMMTTLRTGLRFKDDFPELCCRAWDCFVRCLDHACLGSLLSHVIVALLPLIHIQPKETAAIFHYLIIENRDAVQDFLHEIYFLPDHPELKKIKAVLQEYRKETSESTDLQTTLQLSMKAIQHENVDVRIHALTSLKETLYKNQEKLIKYATDSETVEPIISQLVTVLLKGCQDANSQARLLCGECLGELGAIDPGRLDFSTTETQGKDFTFVTGVEDSSFAYGLLMELTRAYLAYADNSRAQDSAAYAIQELLSIYDCREMETNGPGHQLWRRFPEHVREILEPHLNTRYKSSQKSTDWSGVKKPIYLSKLGSNFAEWSASWAGYLITKVRHDLASKIFTCCSIMMKHDFKVTIYLLPHILVYVLLGCNQEDQQEVYAEIMAVLKHDDQHTINTQDIASDLCQLSTQTVFSMLDHLTQWARHKFQALKAEKCPHSKSNRNKVDSMVSTVDYEDYQSVTRFLDLIPQDTLAVASFRSKAYTRAVMHFESFITEKKQNIQEHLGFLQKLYAAMHEPDGVAGVSAIRKAEPSLKEQILEHESLGLLRDATACYDRAIQLEPDQIIHYHGVVKSMLGLGQLSTVITQVNGVHANRSEWTDELNTYRVEAAWKLSQWDLVENYLAADGKSTTWSVRLGQLLLSAKKRDITAFYDSLKLVRAEQIVPLSAASFERGSYQRGYEYIVRLHMLCELEHSIKPLFQHSPGDSSQEDSLNWVARLEMTQNSYRAKEPILALRRALLSLNKRPDYNEMVGECWLQSARVARKAGHHQTAYNALLNAGESRLAELYVERAKWLWSKGDVHQALIVLQKGVELCFPENETPPEGKNMLIHGRAMLLVGRFMEETANFESNAIMKKYKDVTACLPEWEDGHFYLAKYYDKLMPMVTDNKMEKQGDLIRYIVLHFGRSLQYGNQFIYQSMPRMLTLWLDYGTKAYEWEKAGRSDRVQMRNDLGKINKVITEHTNYLAPYQFLTAFSQLISRICHSHDEVFVVLMEIIAKVFLAYPQQAMWMMTAVSKSSYPMRVNRCKEILNKAIHMKKSLEKFVGDATRLTDKLLELCNKPVDGSSSTLSMSTHFKMLKKLVEEATFSEILIPLQSVMIPTLPSILGTHANHASHEPFPGHWAYIAGFDDMVEILASLQKPKKISLKGSDGKFYIMMCKPKDDLRKDCRLMEFNSLINKCLRKDAESRRRELHIRTYAVIPLNDECGIIEWVNNTAGLRPILTKLYKEKGVYMTGKELRQCMLPKSAALSEKLKVFREFLLPRHPPIFHEWFLRTFPDPTSWYSSRSAYCRSTAVMSMVGYILGLGDRHGENILFDSLTGECVHVDFNCLFNKGETFEVPEIVPFRLTHNMVNGMGPMGTEGLFRRACEVTMRLMRDQREPLMSVLKTFLHDPLVEWSKPVKGHSKAPLNETGEVVNEKAKTHVLDIEQRLQGVIKTRNRVTGLPLSIEGHVHYLIQEATDENLLCQMYLGWTPYM

SEQ ID NO: 42 - protein, 627 aa, Homo sapiens
MCVPRSGLILSCICLYCGVLLPVLLPNLPFLTCLSMSTLESVTYLPEKGLYCQRLPSSRTHGGTESLKGKNTENMGFYGTLKMIFYKMKRKLDHGSEVRSFSLGKKPCKVSEYTSTTGLVPCSATPTTFGDLRAANGQGQQRRRITSVQPPTGLQEWLKMFQSWSGPEKLLALDELIDSCEPTQVKHMMQVIEPQFQRDFISLLPKELALYVLSFLEPKDLLQAAQTCRYWRILAEDNLLWREKCKEEGIDEPLHIKRRKVIKPGFIHSPWKSAYIRQHRIDTNWRRGELKSPKVLKGHDDHVITCLQFCGNRIVSGSDDNTLKVWSAVTGKCLRTLVGHTGGVWSSQMRDNIIISGSTDRTLKVWNAETGECIHTLYGHTSTVRCMHLHEKRVVSGSRDATLRVWDIETGQCLHVLMGHVAAVRCVQYDGRRVVSGAYDFMVKVWDPETETCLHTLQGHTNRVYSLQFDGIHVVSGSLDTSIRVWDVETGNCIHTLTGHQSLTSGMELKDNILVSGNADSTVKIWDIKTGQCLQTLQGPNKHQSAVTCLQFNKNFVITSSDDGTVKLWDLKTGEFIRNLVTLESGGSGGVVWRIRASNTKLVCAVGSRNGTEETKLLVLDFDVDMK

SEQ ID NO: 43 - protein, 1338 aa, Homo sapiens
MVSYWDTGVLLCALLSCLLLTGSSSGSKLKDPELSLKGTQHIMQAGQTLHLQCRGEAAHKWSLPEMVSKESERLSITKSACGRNGKQFCSTLTLNTAQANHTGFYSCKYLAVPTSKKKETESAIYIFISDTGRPFVEMYSEIPEIIHMTEGRELVIPCRVTSPNITVTLKKFPLDTLIPDGKRIIWDSRKGFIISNATYKEIGLLTCEATVNGHLYKTNYLTHRQTNTIIDVQISTPRPVKLLRGHTLVLNCTATTPLNTRVQMTWSYPDEKNKRASVRRRIDQSNSHANIFYSVLTIDKMQNKDKGLYTCRVRSGPSFKSVNTSVHIYDKAFITVKHRKQQVLETVAGKRSYRLSMKVKAFPSPEVVWLKDGLPATEKSARYLTRGYSLIIKDVTEEDAGNYTILLSIKQSNVFKNLTATLIVNVKPQIYEKAVSSFPDPALYPLGSRQILTCTAYGIPQPTIKWFWHPCNHNHSEARCDFCSNNEESFILDADSNMGNRIESITQRMAIIEGKNKMASTLVVADSRISGIYICIASNKVGTVGRNISFYITDVPNGFHVNLEKMPTEGEDLKLSCTVNKFLYRDVTWILLRTVNNRTMHYSISKQKMAITKEHSITLNLTIMNVSLQDSGTYACRARNVYTGEEILQKKEITIRDQEAPYLLRNLSDHTVAISSSTTLDCHANGVPEPQITWFKNNHKIQQEPGIILGPGSSTLFIERVTEEDEGVYHCKATNQKGSVESSAYLTVQGTSDKSNLELITLTCTCVAATLFWLLLTLFIRKMKRSSSEIKTDYLSIIMDPDEVPLDEQCERLPYDASKWEFARERLKLGKSLGRGAFGKVVQASAFGIKKSPTCRTVAVKMLKEGATASEYKALMTELKILTHIGHHLNVVNLLGACTKQGGPLMVIVEYCKYGNLSNYLKSKRDLFFLNKDAALHMEPKKEKMEPGLEQGKKPRLDSVTSSESFASSGFQEDKSLSDVEEEEDSDGFYKEPITMEDLISYSFQVARGMEFLSSRKCIHRDLAARNILLSENNVVKICDFGLARDIYKNPDYVRKGDTRLPLKWMAPESIFDKIYSTKSDVWSYGVLLWEIFSLGGSPYPGVQMDEDFCSRLREGMRMRAPEYSTPEIYQIMLDCWHRDPKERPRFAELVEKLGDLLQANVQQDGKDYIPINAILTGNSGFTYSTPAFSEDFFKESISAPKFNSGSSDDVRYVNAFKFMSLERIKTFEELLPNATSMFDDYQGDSSTLLASPMLKRFTWTDSKPKASLKIDLRVTSKSKESGLSDVSRPSFCHSSCGHVSEGKRRFTYDHAELERKIACCSPPPDYNSVVLYSTPPI

SEQ ID NO: 44 - protein, 993 aa, Homo sapiens
MPALARDGGQLPLLVVFSAMIFGTITNQDLPVIKCVLINHKNNDSSVGKSSSYPMVSESPEDLGCALRPQSSGTVYEAAAVEVDVSASITLQVLVDAPGNISCLWVFKHSSLNCQPHFDLQNRGVVSMVILKMTETQAGEYLLFIQSEATNYTILFTVSIRNTLLYTLRRPYFRKMENQDALVCISESVPEPIVEWVLCDSQGESCKEESPAVVKKEEKVLHELFGTDIRCCARNELGRECTRLFTIDLNQTPQTTLPQLFLKVGEPLWIRCKAVHVNHGFGLTWELENKALEEGNYFEMSTYSTNRTMIRILFAFVSSVARNDTGYYTCSSSKHPSQSALVTIVEKGFINATNSSEDYEIDQYEEFCFSVRFKAYPQIRCTWTFSRKSFPCEQKGLDNGYSISKFCNHKHQPGEYIFHAENDDAQFTKMFTLNIRRKPQVLAEASASQASCFSDGYPLPSWTWKKCSDKSPNCTEEITEGVWNRKANRKVFGQWVSSSTLNMSEAIKGFLVKCCAYNSLGTSCETILLNSPGPFPFIQDNISFYATIGVCLLFIVVLTLLICHKYKKQFRYESQLQMVQVTGSSDNEYFYVDFREYEYDLKWEFPRENLEFGKVLGSGAFGKVMNATAYGISKTGVSIQVAVKMLKEKADSSEREALMSELKMMTQLGSHENIVNLLGACTLSGPIYLIFEYCCYGDLLNYLRSKREKFHRTWTEIFKEHNFSFYPTFQSHPNSSMPGSREVQIHPDSDQISGLHGNSFHSEDEIEYENQKRLEEEEDLNVLTFEDLLCFAYQVAKGMEFLEFKSCVHRDLAARNVLVTHGKVVKICDFGLARDIMSDSNYVVRGNARLPVKWMAPESLFEGIYTIKSDVWSYGILLWEIFSLGVNPYPGIPVDANFYKLIQNGFKMDQPFYATEEIYIIMQSCWAFDSRKRPSFPNLTSFLGCQLADAEEAMYQNVDGRVSECPHTYQNRRPFSREMDLGLLSPQAQVEDS

SEQ ID NO: 45 - protein, 2551 aa, Homo sapiens
MLGTGPAAATTAATTSSNVSVLQQFASGLKSRNEETRAKAAKELQHYVTMELREMSQEESTRFYDQLNHHIFELVSSSDANERKGGILAIASLIGVEGGNATRIGRFANYLRNLLPSNDPVVMEMASKAIGRLAMAGDTFTAEYVEFEVKRALEWLGADRNEGRRHAAVLVLRELAISVPTFFFQQVQPFFDNIFVAVWDPKQAIREGAVAALRACLILTTQREPKEMQKPQWYRHTFEEAEKGFDETLAKEKGMNRDDRIHGALLILNELVRISSMEGERLREEMEEITQQQLVHDKYCKDLMGFGTKPRHITPFTSFQAVQPQQSNALVGLLGYSSHQGLMGFGTSPSPAKSTLVESRCCRDLMEEKFDQVCQWVLKCRNSKNSLIQMTILNLLPRLAAFRPSAFTDTQYLQDTMNHVLSCVKKEKERTAAFQALGLLSVAVRSEFKVYLPRVLDIIRAALPPKDFAHKRQKAMQVDATVFTCISMLARAMGPGIQQDIKELLEPMLAVGLSPALTAVLYDLSRQIPQLKKDIQDGLLKMLSLVLMHKPLRHPGMPKGLAHQLASPGLTTLPEASDVGSITLALRTLGSFEFEGHSLTQFVRHCADHFLNSEHKEIRMEAARTCSRLLTPSIHLISGHAHVVSQTAVQVVADVLSKLLVVGITDPDPDIRYCVLASLDERFDAHLAQAENLQALFVALNDQVFEIRELAICTVGRLSSMNPAFVMPFLRKMLIQILTELEHSGIGRIKEQSARMLGHLVSNAPRLIRPYMEPILKALILKLKDPDPDPNPGVINNVLATIGELAQVSGLEMRKWVDELFIIIMDMLQDSSLLAKRQVALWTLGQLVASTGYVVEPYRKYPTLLEVLLNFLKTEQNQGTRREAIRVLGLLGALDPYKHKVNIGMIDQSRDASAVSLSESKSSQDSSDYSTSEMLVNMGNLPLDEFYPAVSMVALMRIFRDQSLSHHHTMVVQAITFIFKSLGLKCVQFLPQVMPTFLNVIRVCDGAIREFLFQQLGMLVSFVKSHIRPYMDEIVTLMREFWVMNTSIQSTIILLIEQIVVALGGEFKLYLPQLIPHMLRVFMHDNSPGRIVSIKLLAAIQLFGANLDDYLHLLLPPIVKLFDAPEAPLPSRKAALETVDRLTESLDFTDYASRIIHPIVRTLDQSPELRSTAMDTLSSLVFQLGKKYQIFIPMVNKVLVRHRINHQRYDVLICRIVKGYTLADEEEDPLIYQHRMLRSGQGDALASGPVETGPMKKLHVSTINLQKATAWGAARRVSKDDWLEWLRRLSLELLKDSSSPSLRSCWALAQAYNPMARDLFNAAFVSCWSELNEDQQDELIRSIELALTSQDIAEVTQTLLNLAEFMEHSDKGPLPLRDDNGIVLLGERAAKCRAYAKALHYKELEFQKGPTPAILESLISINNKLQQPEAAAGVLEYAMKHFGELEIQATWYEKLHEWEDALVAYDKKMDTNKDDPELMLGRMRCLEALGEWGQLHQQCCEKWTLVNDETQAKMARMAAAAAWGLGQWDSMEEYTCMIPRDTHDGAFYRAVLALHQDLFSLAQQCIDKARDLLDAELTAMAGESYSRAYGAMVSCHMLSELEEVIQYKLVPERREIIRQIWWERLQGCQRIVEDWQKILMVRSLVVSPHEDMRTWLKYASLCGKSGRLALAHKTLVLLLGVDPSRQLDHPLPTVHPQVTYAYMKNMWKSARKIDAFQHMQHFVQTMQQQAQHAIATEDQQHKQELHKLMARCFLKLGEWQLNLQGINESTIPKVLQYYSAATEHDRSWYKAWHAWAVMNFEAVLHYKHQNQARDEKKKLRHASGANITNATTAATTAATATTTASTEGSNSESEAESTENSPTPSPLQKKVTEDLSKTLLMYTVPAVQGFFRSISLSRGNNLQDTLRVLTLWFDYGHWPDVNEALVEGVKAIQIDTWLQVIPQLIARIDTPRPLVGRLIHQLLTDIGRYHPQALIYPLTVASKSTTTARHNAANKILKNMCEHSNTLVQQAMMVSEELIRVAILWHEMWHEGLEEASRLYFGERNVKGMFEVLEPLHAMMERGPQTLKETSFNQAYGRDLMEAQEWCRKYMKSGNVKDLTQAWDLYYHVFRRISKQLPQLTSLELQYVSPKLLMCRDLELAVPGTYDPNQPIIRIQSIAPSLQVITSKQRPRKLTLMGSNGHEFVFLLKGHEDLRQDERVMQLFGLVNTLLANDPTSLRKNLSIQRYAVIPLSTNSGLIGWVPHCDTLHALIRDYREKKKILLNIEHRIMLRMAPDYDHLTLMQKVEVFEHAVNNTAGDDLAKLLWLKSPSSEVWFDRRTNYTRSLAVMSMVGYILGLGDRHPSNLMLDRLSGKILHIDFGDCFEVAMTREKFPEKIPFRLTRMLTNAMEVTGLDGNYRITCHTVMEVLREHKDSVMAVLEAFVYDPLLNWRLMDTNTKGNKRSRTRTDSYSAGQSVEILDGVELGEPAHKKTGTTVPESIHSFIGDGLVKPEALNKKAIQIINRVRDKLTGRDFSHDDTLDVPTQVELLIKQATSHENLCQCYIGWCPFW

SEQ ID NO: 46 - protein, 1356 aa, Homo sapiens
MQSKVLLAVALWLCVETRAASVGLPSVSLDLPRLSIQKDILTIKANTTLQITCRGQRDLDWLWPNNQSGSEQRVEVTECSDGLFCKTLTIPKVIGNDTGAYKCFYRETDLASVIYVYVQDYRSPFIASVSDQHGVVYITENKNKTVVIPCLGSISNLNVSLCARYPEKRFVPDGNRISWDSKKGFTIPSYMISYAGMVFCEAKINDESYQSIMYIVVVVGYRIYDVVLSPSHGIELSVGEKLVLNCTARTELNVGIDFNWEYPSSKHQHKKLVNRDLKTQSGSEMKKFLSTLTIDGVTRSDQGLYTCAASSGLMTKKNSTFVRVHEKPFVAFGSGMESLVEATVGERVRIPAKYLGYPPPEIKWYKNGIPLESNHTIKAGHVLTIMEVSERDTGNYTVILTNPISKEKQSHVVSLVVYVPPQIGEKSLISPVDSYQYGTTQTLTCTVYAIPPPHHIHWYWQLEEECANEPSQAVSVTNPYPCEEWRSVEDFQGGNKIEVNKNQFALIEGKNKTVSTLVIQAANVSALYKCEAVNKVGRGERVISFHVTRGPEITLQPDMQPTEQESVSLWCTADRSTFENLTWYKLGPQPLPIHVGELPTPVCKNLDTLWKLNATMFSNSTNDILIMELKNASLQDQGDYVCLAQDRKTKKRHCVVRQLTVLERVAPTITGNLENQTTSIGESIEVSCTASGNPPPQIMWFKDNETLVEDSGIVLKDGNRNLTIRRVRKEDEGLYTCQACSVLGCAKVEAFFIIEGAQEKTNLEIIILVGTAVIAMFFWLLLVIILRTVKRANGGELKTGYLSIVMDPDELPLDEHCERLPYDASKWEFPRDRLKLGKPLGRGAFGQVIEADAFGIDKTATCRTVAVKMLKEGATHSEHRALMSELKILIHIGHHLNVVNLLGACTKPGGPLMVIVEFCKFGNLSTYLRSKRNEFVPYKTKGARFRQGKDYVGAIPVDLKRRLDSITSSQSSASSGFVEEKSLSDVEEEEAPEDLYKDFLTLEHLICYSFQVAKGMEFLASRKCIHRDLAARNILLSEKNVVKICDFGLARDIYKDPDYVRKGDARLPLKWMAPETIFDRVYTIQSDVWSFGVLLWEIFSLGASPYPGVKIDEEFCRRLKEGTRMRAPDYTTPEMYQTMLDCWHGEPSQRPTFSELVEHLGNLLQANAQQDGKDYIVLPISETLSMEEDSGLSLPTSPVSCMEEEEVCDPKFHYDNTAGISQYLQNSKRKSRPVSVKTFEDIPLEEPEVKVIPDDNQTDSGMVLASEELKTLEDRTKLSPSFGGMVPSKSRESVASEGSNQTSGYQSGYHSDDTDTTVYSSEEAELLKLIEIGVQTGSTAQILQPDSGTTLSSPPV

SEQ ID NO: 47 - protein, 1408 aa, Homo sapiens
MKAPAVLAPGILVLLFTLVQRSNGECKEALAKSEMNVNMKYQLPNFTAETPIQNVILHEHHIFLGATNYIYVLNEEDLQKVAEYKTGPVLEHPDCFPCQDCSSKANLSGGVWKDNINMALVVDTYYDDQLISCGSVNRGTCQRHVFPHNHTADIQSEVHCIFSPQIEEPSQCPDCVVSALGAKVLSSVKDRFINFFVGNTINSSYFPDHPLHSISVRRLKETKDGFMFLTDQSYIDVLPEFRDSYPIKYVHAFESNNFIYFLTVQRETLDAQTFHTRIIRFCSINSGLHSYMEMPLECILTEKRKKRSTKKEVFNILQAAYVSKPGAQLARQIGASLNDDILFGVFAQSKPDSAEPMDRSAMCAFPIKYVNDFFNKIVNKNNVRCLQHFYGPNHEHCFNRTLLRNSSGCEARRDEYRTEFTTALQRVDLFMGQFSEVLLTSISTFIKGDLTIANLGTSEGRFMQVVVSRSGPSTPHVNFLLDSHPVSPEVIVEHTLNQNGYTLVITGKKITKIPLNGLGCRHFQSCSQCLSAPPFVQCGWCHDKCVRSEECLSGTWTQQICLPAIYKVFPNSAPLEGGTRLTICGWDFGFRRNNKFDLKKTRVLLGNESCTLTLSESTMNTLKCTVGPAMNKHFNMSIIISNGHGTTQYSTFSYVDPVITSISPKYGPMAGGTLLTLTGNYLNSGNSRHISIGGKTCTLKSVSNSILECYTPAQTISTEFAVKLKIDLANRETSIFSYREDPIVYEIHPTKSFISTWWKEPLNIVSFLFCFASGGSTITGVGKNLNSVSVPRMVINVHEAGRNFTVACQHRSNSEIICCTTPSLQQLNLQLPLKTKAFFMLDGILSKYFDLIYVHNPVFKPFEKPVMISMGNENVLEIKGNDIDPEAVKGEVLKVGNKSCENIHLHSEAVLCTVPNDLLKLNSELNIEWKQAISSTVLGKVIVQPDQNFTGLIAGVVSISTALLLLLGFFLWLKKRKQIKDLGSELVRYDARVHTPHLDRLVSARSVSPTTEMVSNESVDYRATFPEDQFPNSSQNGSCRQVQYPLTDMSPILTSGDSDISSPLLQNTVHIDLSALNPELVQAVQHVVIGPSSLIVHFNEVIGRGHFGCVYHGTLLDNDGKKIHCAVKSLNRITDIGEVSQFLTEGIIMKDFSHPNVLSLLGICLRSEGSPLVVLPYMKHGDLRNFIRNETHNPTVKDLIGFGLQVAKGMKYLASKKFVHRDLAARNCMLDEKFTVKVADFGLARDMYDKEYYSVHNKTGAKLPVKWMALESLQTQKFTTKSDVWSFGVLLWELMTRGAPPYPDVNTFDITVYLLQGRRLLQPEYCPDPLYEVMLKCWHPKAEMRPSFSELVSRISAIFSTFIGEHYVHVNATYVNVKCVAPYPSLLSSEDNADDEVDTRPASFWETS

SEQ ID NO: 48 - protein, 512 aa, Homo sapiens
MAHSCRWRFPARPGTTGGGGGGGRRGLGGAPRQRVPALLLPPGPPVGGGGPGAPPSPPAVAAAAAAAGSSGAGVPGGAAAASAASSSSASSSSSSSSSASSGPALLRVGPGFDAALQVSAAIGTNLRRFRAVFGESGGGGGSGELTTQIPCSWRTKGHIHDKKTEPFRLLAWSWCLNDEQFLGFGSDEEVRVRSPTRSPSVKTSPRKPRGRPRSGSDRNSAILSDPSVFSPLNKSETKSGDKIKKKDSKSIEKKRGRPPTFPGVKIKITHGKDISELPKGNKEDSLKKIKRTPSATFQQATKIKKLRAGKLSPLKSKFKTGKLQIGRKGVQIVRRRGRPPSTERIKTPSGLLINSELEKPQKVRKDKEGTPPLTKEDKTVVRQSPRRIKPVRIIPSSKRTDATIAKQLLQRAKKGAQKKIEKEAAQLQGRKVKTQVKNIRQFIMPVVSAISSRIIKTPRRFIEDEDYDPPIKIARLESTPNSRFSAPSCGSSEKSSAASQHSSQMSSDSSRS

SEQ ID NO: 49 - protein, 2839 aa, Homo sapiens
MAAHRPVEWVQAVVSRFDEQLPIKTGQQNTHTKVSTEHNKECLINISKYKFSLVISGLTTILKNVNNMRIFGEAAEKNLYLSQLIILDTLEKCLAGQPKDTMRLDETMLVKQLLPEICHFLHTCREGNQHAAELRNSASGVLFSLSCNNFNAVFSRISTRLQELTVCSEDNVDVHDIELLQYINVDCAKLKRLLKETAFKFKALKKVAQLAVINSLEKAFWNWVENYPDEFTKLYQIPQTDMAECAEKLFDLVDGFAESTKRKAAVWPLQIILLILCPEIIQDISKDVVDENNMNKKLFLDSLRKALAGHGGSRQLTESAAIACVKLCKASTYINWEDNSVIFLLVQSMVVDLKNLLFNPSKPFSRGSQPADVDLMIDCLVSCFRISPHNNQHFKICLAQNSPSTFHYVLVNSLHRIITNSALDWWPKIDAVYCHSVELRNMFGETLHKAVQGCGAHPAIRMAPSLTFKEKVTSLKFKEKPTDLETRSYKYLLLSMVKLIHADPKLLLCNPRKQGPETQGSTAELITGLVQLVPQSHMPEIAQEAMEALLVLHQLDSIDLWNPDAPVETFWEISSQMLFYICKKLTSHQMLSSTEILKWLREILICRNKFLLKNKQADRSSCHFLLFYGVGCDIPSSGNTSQMSMDHEELLRTPGASLRKGKGNSSMDSAAGCSGTPPICRQAQTKLEVALYMFLWNPDTEAVLVAMSCFRHLCEEADIRCGVDEVSVHNLLPNYNTFMEFASVSNMMSTGRAALQKRVMALLRRIEHPTAGNTEAWEDTHAKWEQATKLILNYPKAKMEDGQAAESLHKTIVKRRMSHVSGGGSIDLSDTDSLQEWINMTGFLCALGGVCLQQRSNSGLATYSPPMGPVSERKGSMISVMSSEGNADTPVSKFMDRLLSLMVCNHEKVGLQIRTNVKDLVGLELSPALYPMLFNKLKNTISKFFDSQGQVLLTDTNTQFVEQTIAIMKNLLDNHTEGSSEHLGQASIETMMLNLVRYVRVLGNMVHAIQIKTKLCQLVEVMMARRDDLSFCQEMKFRNKMVEYLTDWVMGTSNQAADDDVKCLTRDLDQASMEAVVSLLAGLPLQPEEGDGVELMEAKSQLFLKYFTLFMNLLNDCSEVEDESAQTGGRKRGMSRRLASLRHCTVLAMSNLLNANVDSGLMHSIGLGYHKDLQTRATFMEVLTKILQQGTEFDTLAETVLADRFERLVELVTMMGDQGELPIAMALANVVPCSQWDELARVLVTLFDSRHLLYQLLWNMFSKEVELADSMQTLFRGNSLASKIMTFCFKVYGATYLQKLLDPLLRIVITSSDWQHVSFEVDPTRLEPSESLEENQRNLLQMTEKFFHAIISSSSEFPPQLRSVCHCLYQATCHSLLNKATVKEKKENKKSVVSQRFPQNSIGAVGSAMFLRFINPAIVSPYEAGILDKKPPPRIERGLKLMSKILQSIANHVLFTKEEHMRPFNDFVKSNFDAARRFFLDIASDCPTSDAVNHSLSFISDGNVLALHRLLWNNQEKIGQYLSSNRDHKAVGRRPFDKMATLLAYLGPPEHKPVADTHWSSLNLTSSKFEEFMTRHQVHEKEEFKALKTLSIFYQAGTSKAGNPIFYYVARRFKTGQINGDLLIYHVLLTLKPYYAKPYEIVVDLTHTGPSNRFKTDFLSKWFVVFPGFAYDNVSAVYIYNCNSWVREYTKYHERLLTGLKGSKRLVFIDCPGKLAEHIEHEQQKLPAATLALEEDLKVFHNALKLAHKDTKVSIKVGSTAVQVTSAERTKVLGQSVFLNDIYYASEIEEICLVDENQFTLTIANQGTPLTFMHQECEAIVQSIIHIRTRWELSQPDSIPQHTKIRPKDVPGTLLNIALLNLGSSDPSLRSAAYNLLCALTCTFNLKIEGQLLETSGLCIPANNTLFIVSISKTLAANEPHLTLEFLEECISGFSKSSIELKHLCLEYMTPWLSNLVRFCKHNDDAKRQRVTAILDKLITMTINEKQMYPSIQAKIWGSLGQITDLLDVVLDSFIKTSATGGLGSIKAEVMADTAVALASGNVKLVSSKVIGRMCKIIDKTCLSPTPTLEQHLMWDDIAILARYMLMLSFNNSLDVAAHLPYLFHVVTFLVATGPLSLRASTHGLVINIIHSLCTCSQLHFSEETKQVLRLSLTEFSLPKFYLLFGISKVKSAAVIAFRSSYRDRSFSPGSYERETFALTSLETVTEALLEIMEACMRDIPTCKWLDQWTELAQRFAFQYNPSLQPRALVVFGCISKRVSHGQIKQIIRILSKALESCLKGPDTYNSQVLIEATVIALTKLQPLLNKDSPLHKALFWVAVAVLQLDEVNLYSAGTALLEQNLHTLDSLRIFNDKSPEEVFMAIRNPLEWHCKQMDHFVGLNFNSNFNFALVGHLLKGYRHPSPAIVARTVRILHTLLTLVNKHRNCDKFEVNTQSVAYLAALLTVSEEVRSRCSLKHRKSLLLTDISMENVPMDTYPIHHGDPSYRTLKETQPWSSPKGSEGYLAATYPTVGQTSPRARKSMSLDMGQPSQANTKKLLGTRKSFDHLISDTKAPKRQEMESGITTPPKMRRVAETDYEMETQRISSSQQHPHLRKVSVSESNVLLDEEVLTDPKIQALLLTVLATLVKYTTDEFDQRILYEYLAEASVVFPKVFPVVHNLLDSKINTLLSLCQDPNLLNPIHGIVQSVVYHEESPPQYQTSYLQSFGFNGLWRFAGPFSKQTQIPDYAELIVKFLDALIDTYLPGIDEETSEESLLTPTSPYPPALQSQLSITANLNLSNSMTSLATSQHSPGIDKENVELSPTTGHCNSGRTRHGSASQVQKQRSAGSFKRNSIKKIV

SEQ ID NO: 50 - protein, 1089 aa, Homo sapiens
MGTSHPAFLVLGCLLTGLSLILCQLSLPSILPNENEKVVQLNSSFSLRCFGESEVSWQYPMSEEESSDVEIRNEENNSGLFVTVLEVSSASAAHTGLYTCYYNHTQTEENELEGRHIYIYVPDPDVAFVPLGMTDYLVIVEDDDSAIIPCRTTDPETPVTLHNSEGVVPASYDSRQGFNGTFTVGPYICEATVKGKKFQTIPFNVYALKATSELDLEMEALKTVYKSGETIVVTCAVFNNEVVDLQWTYPGEVKGKGITMLEEIKVPSIKLVYTLTVPEATVKDSGDYECAARQATREVKEMKKVTISVHEKGFIEIKPTFSQLEAVNLHEVKHFVVEVRAYPPPRISWLKNNLTLIENLTEITTDVEKIQEIRYRSKLKLIRAKEEDSGHYTIVAQNEDAVKSYTFELLTQVPSSILDLVDDHHGSTGGQTVRCTAEGTPLPDIEWMICKDIKKCNNETSWTILANNVSNIITEIHSRDRSTVEGRVTFAKVEETIAVRCLAKNLLGAENRELKLVAPTLRSELTVAAAVLVLLVIVIISLIVLVVIWKQKPRYEIRWRVIESISPDGHEYIYVDPMQLPYDSRWEFPRDGLVLGRVLGSGAFGKVVEGTAYGLSRSQPVMKVAVKMLKPTARSSEKQALMSELKIMTHLGPHLNIVNLLGACTKSGPIYIITEYCFYGDLVNYLHKNRDSFLSHHPEKPKKELDIFGLNPADESTRSYVILSFENNGDYMDMKQADTTQYVPMLERKEVSKYSDIQRSLYDRPASYKKKSMLDSEVKNLLSDDNSEGLTLLDLLSFTYQVARGMEFLASKNCVHRDLAARNVLLAQGKIVKICDFGLARDIMHDSNYVSKGSTFLPVKWMAPESIFDNLYTTLSDVWSYGILLWEIFSLGGTPYPGMMVDSTFYNKIKSGYRMAKPDHATSEVYEIMVKCWNSEPEKRPSFYHLSEIVENLLPGQYKKSYEKIHLDFLKSDHPAVARMRVDSDNAYIGVTYKNEEDKLKDWEGGLDEQRLSADSGYIIPLPDIDPVPEEEDLGKRNRHSSQTSEESAIETGSSSSTFIKREDETIEDIDMMDDIGIDSSDLVEDSFL

SEQ ID NO: 51 - protein, 1106 aa, Homo sapiens
MRLPGAMPALALKGELLLLSLLLLLEPQISQGLVVTPPGPELVLNVSSTFVLTCSGSAPVVWERMSQEPPQEMAKAQDGTFSSVLTLTNLTGLDTGEYFCTHNDSRGLETDERKRLYIFVPDPTVGFLPNDAEELFIFLTEITEITIPCRVTDPQLVVTLHEKKGDVALPVPYDHQRGFSGIFEDRSYICKTTIGDREVDSDAYYVYRLQVSSINVSVNAVQTVVRQGENITLMCIVIGNEVVNFEWTYPRKESGRLVEPVTDFLLDMPYHIRSILHIPSAELEDSGTYTCNVTESVNDHQDEKAINITVVESGYVRLLGEVGTLQFAELHRSRTLQVVFEAYPPPTVLWFKDNRTLGDSSAGEIALSTRNVSETRYVSELTLVRVKVAEAGHYTMRAFHEDAEVQLSFQLQINVPVRVLELSESHPDSGEQTVRCRGRGMPQPNIIWSACRDLKRCPRELPPTLLGNSSEEESQLETNVTYWEEEQEFEVVSTLRLQHVDRPLSVRCTLRNAVGQDTQEVIVVPHSLPFKVVVISAILALVVLTIISLIILIMLWQKKPRYEIRWKVIESVSSDGHEYIYVDPMQLPYDSTWELPRDQLVLGRTLGSGAFGQVVEATAHGLSHSQATMKVAVKMLKSTARSSEKQALMSELKIMSHLGPHLNVVNLLGACTKGGPIYIITEYCRYGDLVDYLHRNKHTFLQHHSDKRRPPSAELYSNALPVGLPLPSHVSLTGESDGGYMDMSKDESVDYVPMLDMKGDVKYADIESSNYMAPYDNYVPSAPERTCRATLINESPVLSYMDLVGFSYQVANGMEFLASKNCVHRDLAARNVLICEGKLVKICDFGLARDIMRDSNYISKGSTFLPLKWMAPESIFNSLYTTLSDVWSFGILLWEIFTLGGTPYPELPMNEQFYNAIKRGYRMAQPAHASDEIYEIMQKCWEEKFEIRPPFSQLVLLLERLLGEGYKKKYQQVDEEFLRSDHPAILRSQARLPGFHGLRSPLDTSSVLYTAVQPNEGDNDYIIPLPDPKPEVADEGPLEGSPSLASSTLNEVNTSSTISCDSPLEPQDEPEPEPQLELQVEPEPELEQLPDSGCPAPRAEAEDSFL

SEQ ID NO: 52 - protein, 603 aa, Homo sapiens
MSAAVTAGKLARAPADPGKAGVPGVAAPGAPAAAPPAKEIPEVLVDPRSRRRYVRGRFLGKGGFAKCFEISDADTKEVFAGKIVPKSLLLKPHQREKMSMEISIHRSLAHQHVVGFHGFFEDNDFVFVVLELCRRRSLLELHKRRKALTEPEARYYLRQIVLGCQYLHRNRVIHRDLKLGNLFLNEDLEVKIGDFGLATKVEYDGERKKTLCGTPNYIAPEVLSKKGHSFEVDVWSIGCIMYTLLVGKPPFETSCLKETYLRIKKNEYSIPKHINPVAASLIQKMLQTDPTARPTINELLNDEFFTSGYIPARLPITCLTIPPRFSIAPSSLDPSNRKPLTVLNKGLENPLPERPREKEEPVVRETGEVVDCHLSDMLQQLHSVNASKPSERGLVRQEEAEDPACIPIFWVSKWVDYSDKYGLGYQLCDNSVGVLFNDSTRLILYNDGDSLQYIERDGTESYLTVSSHPNSLMKKITLLKYFRNYMSEHLLKAGANITPREGDELARLPYLRTWFRTRSAIILHLSNGSVQINFFQDHTKLILCPLMAAVTYIDEKRDFRTYRLSLLEEYGCCKELASRLRYARTMVDKLLSSRSASNRLKAS

SEQ ID NO: 53 - protein, 631 aa, Homo sapiens
MVSKLSQLQTELLAALLESGLSKEALIQALGEPGPYLLAGEGPLDKGESCGGGRGELAELPNGLGETRGSEDETDDDGEDFTPPILKELENLSPEEAAHQKAVVETLLQEDPWRVAKMVKSYLQQHNIPQREVVDTTGLNQSHLSQHLNKGTPMKTQKRAALYTWYVRKQREVAQQFTHAGQGGLIEEPTGDELPTKKGRRNRFKWGPASQQILFQAYERQKNPSKEERETLVEECNRAECIQRGVSPSQAQGLGSNLVTEVRVYNWFANRRKEEAFRHKLAMDTYSGPPPGPGPGPALPAHSSPGLPPPALSPSKVHGVRYGQPATSETAEVPSSSGGPLVTVSTPLHQVSPTGLEPSHSLLSTEAKLVSAAGGPLPPVSTLTALHSLEQTSPGLNQQPQNLIMASLPGVMTIGPGEPASLGPTFTNTGASTLVIGLASTQAQSVPVINSMGSSLTTLQPVQFSQPLHPSYQQPLMPPVQSHVTQSPFMATMAQLQSPHALYSHKPEVAQYTHTGLLPQTMLITDTTNLSALASLTPTKQVFTSDTEASSESGLHTPASQATTLHVPSQDPASIQHLQPAHRLSASPTVSSSSLVLYQSSDSSNGQSHLLPSNHSVIETFISTQMASSSQ

SEQ ID NO: 54 - protein, 393 aa, Homo sapiens [sequence omitted]

SEQ ID NO: 55 - protein, 764 aa, Homo sapiens
MRPADLLQLVLLLDLPRDLGGMGCSSPPCECHQEEDFRVTCKDIQRIPSLPPSTQTLKLIETHLRTIPSHAFSNLPNISRIYVSIDVTLQQLESHSFYNLSKVTHIEIRNTRNLTYIDPDALKELPLLKFLGIFNTGLKMFPDLTKVYSTDIFFILEITDNPYMTSIPVNAFQGLCNETLTLKLYNNGFTSVQGYAFNGTKLDAVYLNKNKYLTVIDKDAFGGVYSGPSLLDVSQTSVTALPSKGLEHLKELIARNTWTLKKLPLSLSFLHLTRADLSYPSHCCAFKNQKKIRGILESLMCNESSMQSLRQRKSVNALNSPLHQEYEENLGDSIVGYKEKSKFQDTHNNAHYYVFFEEQEDEIIGFGQELKNPQEETLQAFDSHYDYTICGDSEDMVCTPKSDEFNPCEDIMGYKFLRIVVWFVSLLALLGNVFVLLILLTSHYKLNVPRFLMCNLAFADFCMGMYLLLIASVDLYTHSEYYNHAIDWQTGPGCNTAGFFTVFASELSVYTLTVITLERWYAITFAMRLDRKIRLRHACAIMVGGWVCCFLLALLPLVGISSYAKVSICLPMDTETPLALAYIVFVLTLNIVAFVIVCCCYVKIYITVRNPQYNPGDKDTKIAKRMAVLIFTDFICMAPISFYALSAILNKPLITVSNSKILLVLFYPLNSCANPFLYAIFTKAFQRDVFILLSKFGICKRQAQAYRGQRVPPKNSTDIQVQKVTHEMRQGLHNMEDVYELIENSHLTPKKQGQISEEYMQTVL

SEQ ID NO: 56 - protein, 481 aa, Homo sapiens
MNEVSVIKEGWLHKRGEYIKTWRPRYFLLKSDGSFIGYKERPEAPDQTLPPLNNFSVAECQLMKTERPRPNTFVIRCLQWTTVIERTFHVDSPDEREEWMRAIQMVANSLKQRAPGEDPMDYKCGSPSDSSTTEEMEVAVSKARAKVTMNDFDYLKLLGKGTFGKVILVREKATGRYYAMKILRKEVIIAKDEVAHTVTESRVLQNTRHPFLTALKYAFQTHDRLCFVMEYANGGELFFHLSRERVFTEERARFYGAEIVSALEYLHSRDVVYRDIKLENLMLDKDGHIKITDFGLCKEGISDGATMKTFCGTPEYLAPEVLEDNDYGRAVDWWGLGVVMYEMMCGRLPFYNQDHERLFELILMEEIRFPRTLSPEAKSLLAGLLKKDPKQRLGGGPSDAKEVMEHRFFLSINWQDVVQKKLLPPFKPQVTSEVDTRYFDDEFTAQSITITPPDRYDSLGLLELDQRTHFPQFSYSASIRE

SEQ ID NO: 57 - protein, 275 aa, Homo sapiens
MRRLTVDDFEIGRPLGKGKFGNVYLARLKESHFIVALKVLFKSQIEKEGLEHQLRREIEIQAHLQHPNILRLYNYFHDARRVYLILEYAPRGELYKELQKSEKLDEQRTATIIEEVADALTYCHDKKVIHRDIKPENLLLGFRGEVKIADFGWSVHTPLPERKTMCGTLDYLPPEMIEGRTYDEKVDLWCIGVLCYELLVGYPPFESASHSETYRRILKVDVRFPLSMPLGARDLISRLLRYQPLERLPLAQILKHPWVQAHSRRVLPPCAQMAS

SEQ ID NO: 58 - protein, 233 aa, Homo sapiens
MSQSNRELVVDFLSYKLSQKGYSWSQFSDVEENRTEAPEGTESEMETPSAINGNPSWHLADSPAVNGATGHSSSLDAREVIPMAAVKQALREAGDEFELRYRRAFSDLTSQLHITPGTAYQSFEQVVNELFRDGVNWGRIVAFFSFGGALCVESVDKEMQVLVSRIAAWMATYLNDHLEPWIQENGGWDTFVELYGNNAAAESRKGQERFNRWFLTGMTVAGVVLLGSLFSRK

SEQ ID NO: 59 - protein, 173 aa, Homo sapiens
MGRGRCVGPSLQLRGQEWRCSPLVPKGGAAAAELGPGGGENMVRRFLVTLRIRRACGPPRVRVFVVHIPRLTGEWAAPGAPAAVALVLMLLRSQRLGQQPLPRRPGHDDGQRPSGGAAAAPRRGAQLRRPRHSHPTRARRCPGGLPGHAGGAAPGRGAAGRARCLGPSARGPG

SEQ ID NO: 60 - protein, 1342 aa, Homo sapiens
MRANDALQVLGLLFSLARGSEVGNSQAVCPGTLNGLSVTGDAENQYQTLYKLYERCEVVMGNLEIVLTGHNADLSFLQWIREVTGYVLVAMNEFSTLPLPNLRVVRGTQVYDGKFAIFVMLNYNTNSSHALRQLRLTQLTEILSGGVYIEKNDKLCHMDTIDWRDIVRDRDAEIVVKDNGRSCPPCHEVCKGRCWGPGSEDCQTLTKTICAPQCNGHCFGPNPNQCCHDECAGGCSGPQDTDCFACRHFNDSGACVPRCPQPLVYNKLTFQLEPNPHTKYQYGGVCVASCPHNFVVDQTSCVRACPPDKMEVDKNGLKMCEPCGGLCPKACEGTGSGSRFQTVDSSNIDGFVNCTKILGNLDFLITGLNGDPWHKIPALDPEKLNVFRTVREITGYLNIQSWPPHMHNFSVFSNLTTIGGRSLYNRGFSLLIMKNLNVTSLGFRSLKEISAGRIYISANRQLCYHHSLNWTKVLRGPTEERLDIKHNRPRRDCVAEGKVCDPLCSSGGCWGPGPGQCLSCRNYSRGGVCVTHCNFLNGEPREFAHEAECFSCHPECQPMEGTATCNGSGSDTCAQCAHFRDGPHCVSSCPHGVLGAKGPIYKYPDVQNECRPCHENCTQGCKGPELQDCLGQTLVLIGKTHLTMALTVIAGLVVIFMMLGGTFLYWRGRRIQNKRAMRRYLERGESIEPLDPSEKANKVLARIFKETELRKLKVLGSGVFGTVHKGVWIPEGESIKIPVCIKVIEDKSGRQSFQAVTDHMLAIGSLDHAHIVRLLGLCPGSSLQLVTQYLPLGSLLDHVRQHRGALGPQLLLNWGVQIAKGMYYLEEHGMVHRNLAARNVLLKSPSQVQVADFGVADLLPPDDKQLLYSEAKTPIKWMALESIHFGKYTHQSDVWSYGVTVWELMTFGAEPYAGLRLAEVPDLLEKGERLAQPQICTIDVYMVMVKCWMIDENIRPTFKELANEFTRMARDPPRYLVIKRESGPGIAPGPEPHGLTNKKLEEVELEPELDLDLDLEAEEDNLATTTLGSALSLPVGTLNRPRGSQSLLSPSSGYMPMNQGNLGESCQESAVSGSSERCPRPVSLHPMPRGCLASESSEGHVTGSEAELQEKVSMCRSRSRSRSPRPRGDSAYHSQRHSLLTPVTPLSPPGLEEEDVNGYVMPDTHLKGTPSSREGTLSSVGLSSVLGTEEEDEDEEYEYMNRRRRHSPPHPPRPSSLEELGYEYMDVGSDLSASLGSTQSCPLHPVPIMPTAGTTPDEDYEYMNRQRDGGGPGGDYAAMGACPASEQGYEEMRAFQGPGHQAPHVHYARLKTLRSLEATDSAFDNPDYWHSRLFPKANAQRT

SEQ ID NO: 61 - protein, 1308 aa, Homo sapiens
MKPATGLWVWVSLLVAAGTVQPSDSQSVCAGTENKLSSLSDLEQQYRALRKYYENCEVVMGNLEITSIEHNRDLSFLRSVREVTGYVLVALNQFRYLPLENLRIIRGTKLYEDRYALAIFLNYRKDGNFGLQELGLKNLTEILNGGVYVDQNKFLCYADTIHWQDIVRNPWPSNLTLVSTNGSSGCGRCHKSCTGRCWGPTENHCQTLTRTVCAEQCDGRCYGPYVSDCCHRECAGGCSGPKDTDCFACMNFNDSGACVTQCPQTFVYNPTTFQLEHNFNAKYTYGAFCVKKCPHNFVVDSSSCVRACPSSKMEVEENGIKMCKPCTDICPKACDGIGTGSLMSAQTVDSSNIDKFINCTKINGNLIFLVTGIHGDPYNAIEAIDPEKLNVFRTVREITGFLNIQSWPPNMTDFSVFSNLVTIGGRVLYSGLSLLILKQQGITSLQFQSLKEISAGNIYITDNSNLCYYHTINWTTLFSTINQRIVIRDNRKAENCTAEGMVCNHLCSSDGCWGPGPDQCLSCRRFSRGRICIESCNLYDGEFREFENGSICVECDPQCEKMEDGLLTCHGPGPDNCTKCSHFKDGPNCVEKCPDGLQGANSFIFKYADPDRECHPCHPNCTQGCNGPTSHDCIYYPWTGHSTLPQHARTPLIAAGVIGGLFILVIVGLTFAVYVRRKSIKKKRALRRFLETELVEPLTPSGTAPNQAQLRILKETELKRVKVLGSGAFGTVYKGIWVPEGETVKIPVAIKILNETTGPKANVEFMDEALIMASMDHPHLVRLLGVCLSPTIQLVTQLMPHGCLLEYVHEHKDNIGSQLLLNWCVQIAKGMMYLEERRLVHRDLAARNVLVKSPNHVKITDFGLARLLEGDEKEYNADGGKMPIKWMALECIHYRKFTHQSDVWSYGVTIWELMTFGGKPYDGIPTREIPDLLEKGERLPQPPICTIDVYMVMVKCWMIDADSRPKFKELAAEFSRMARDPQRYLVIQGDDRMKLPSPNDSKFFQNLLDEEDLEDMMDAEEYLVPQAFNIPPPIYTSRARIDSNRSEIGHSPPPAYTPMSGNQFVYRDGGFAAEQGVSVPYRAPTSTIPEAPVAQGATAEIFDDSCCNGTLRKPVAPHVQEDSSTQRYSADPTVFAPERSPRGELDEEGYMTPMRDKPKQEYLNPVEENPFVSRRKNGDLQALDNPEYHNASNGPPKAEDEYVNEPLYLNTFANTLGKAEYLKNNILSMPEKAKKAFDNPDYWNHSLPPRSTLQHPDYLQEYSTKYFYKQNGRIRPIVAENPEYLSEFSLKPGTVLPPPPYRHRNTVV

SEQ ID NO: 62 - protein, 806 aa, Homo sapiens
MGAPACALALCVAVAIVAGASSESLGTEQRVVGRAAEVPGPEPGQQEQLVFGSGDAVELSCPPPGGGPMGPTVWVKDGTGLVPSERVLVGPQRLQVLNASHEDSGAYSCRQRLTQRVLCHFSVRVTDAPSSGDDEDGEDEAEDTGVDTGAPYWTRPERMDKKLLAVPAANTVRFRCPAAGNPTPSISWLKNGREFRGEHRIGGIKLRHQQWSLVMESVVPSDRGNYTCVVENKFGSIRQTYTLDVLERSPHRPILQAGLPANQTAVLGSDVEFHCKVYSDAQPHIQWLKHVEVNGSKVGPDGTPYVTVLKTAGANTTDKELEVLSLHNVTFEDAGEYTCLAGNSIGFSHHSAWLVVLPAEEELVEADEAGSVYAGILSYGVGFFLFILVVAAVTLCRLRSPPKKGLGSPTVHKISRFPLKRQVSLESNASMSSNTPLVRIARLSSGEGPTLANVSELELPADPKWELSRARLTLGKPLGEGCFGQVVMAEAIGIDKDRAAKPVTVAVKMLKDDATDKDLSDLVSEMEMMKMIGKHKNIINLLGACTQGGPLYVLVEYAAKGNLREFLRARRPPGLDYSFDTCKPPEEQLTFKDLVSCAYQVARGMEYLASQKCIHRDLAARNVLVTEDNVMKIADFGLARDVHNLDYYKKTTNGRLPVKWMAPEALFDRVYTHQSDVWSFGVLLWEIFTLGGSPYPGIPVEELFKLLKEGHRMDKPANCTHDLYMIMRECWHAAPSQRPTFKQLVEDLDRVLTVTSTDEYLDLSAPFEQYSPGGQDTPSSSSSGDDSVFAHDLLPPAPPSSGGSRT

SEQ ID NO: 63 - protein, 2549 aa, Homo sapiens
MLGTGPAAATTAATTSSNVSVLQQFASGLKSRNEETRAKAAKELQHYVTMELREMSQEESTRFYDQLNHHIFELVSSSDANERKGGILAIASLIGVEGGNATRIGRFANYLRNLLPSNDPVVMEMASKAIGRLAMAGDTFTAEYVEFEVKRALEWLGADRNEGRRHAAVLVLRELAISVPTFFFQQVQPFFDNIFVAVWDPKQAIREGAVAALRACLILTTQREPKEMQKPQWYRHTFEEAEKGFDETLAKEKGMNRDDRIHGALLILNELVRISSMEGERLREEMEEITQQQLVHDKYCKDLMGFGTKPRHITPFTSFQAVQPQQSNALVGLLGYSSHQGLMGFGTSPSPAKSTLVESRCCRDLMEEKFDQVCQWVLKCRNSKNSLIQMTILNLLPRLAAFRPSAFTDTQYLQDTMNHVLSCVKKEKERTAAFQALGLLSVAVRSEFKVYLPRVLDIIRAALPPKDFAHKRQKAMQVDATVFTCISMLARAMGPGIQQDIKELLEPMLAVGLSPALTAVLYDLSRQIPQLKKDIQDGLLKMLSLVLMHKPLRHPGMPKGLAHQLASPGLTTLPEASDVGSITLALRTLGSFEFEGHSLTQFVRHCADHFLNSEHKEIRMEAARTCSRLLTPSIHLISGHAHVVSQTAVQVVADVLSKLLVVGITDPDPDIRYCVLASLDERFDAHLAQAENLQALFVALNDQVFEIRELAICTVGRLSSMNPAFVMPFLRKMLIQILTELEHSGIGRIKEQSARMLGHLVSNAPRLIRPYMEPILKALILKLKDPDPDPNPGVINNVLATIGELAQVSGLEMRKWVDELFIIIMDMLQDSSLLAKRQVALWTLGQLVASTGYVVEPYRKYPTLLEVLLNFLKTEQNQGTRREAIRVLGLLGALDPYKHKVNIGMIDQSRDASAVSLSESKSSQDSSDYSTSEMLVNMGNLPLDEFYPAVSMVALMRIFRDQSLSHHHTMVVQAITFIFKSLGLKCVQFLPQVMPTFLNVIRVCDGAIREFLFQQLGMLVSFVKSHIRPYMDEIVTLMREFWVMNTSIQSTIILLIEQIVVALGGEFKLYLPQLIPHMLRVFMHDNSPGRIVSIKLLAAIQLFGANLDDYLHLLLPPIVKLFDAPEAPLPSRKAALETVDRLTESLDFTDYASRIIHPIVRTLDQSPELRSTAMDTLSSLVFQLGKKYQIFIPMVNKVLVRHRINHQRYDVLICRIVKGYTLADEEEDPLIYQHRMLRSGQGDALASGPVETGPMKKLHVSTINLQKAWGAARRVSKDDWLEWLRRLSLELLKDSSSPSLRSCWALAQAYNPMARDLFNAAFVSCWSELNEDQQDELIRSIELALTSQDIAEVTQTLLNLAEFMEHSDKGPLPLRDDNGIVLLGERAAKCRAYAKALHYKELEFQKGPTPAILESLISINNKLQQPEAAAGVLEYAMKHFGELEIQATWYEKLHEWEDALVAYDKKMDTNKDDPELMLGRMRCLEALGEWGQLHQQCCEKWTLVNDETQAKMARMAAAAAWGLGQWDSMEEYTCMIPRDTHDGAFYRAVLALHQDLFSLAQQCIDKARDLLDAELTAMAGESYSRAYGAMVSCHMLSELEEVIQYKLVPERREIIRQIWWERLQGCQRIVEDWQKILMVRSLVVSPHEDMRTWLKYASLCGKSGRLALAHKTLVLLLGVDPSRQLDHPLPTVHPQVTYAYMKNMWKSARKIDAFQHMQHFVQTMQQQAQHAIATEDQQHKQELHKLMARCFLKLGEWQLNLQGINESTIPKVLQYYSAATEHDRSWYKAWHAWAVMNFEAVLHYKHQNQARDEKKKLRHASGANITNATTAATTAATATTTASTEGSNSESEAESTENSPTPSPLQKKVTEDLSKTLLMYTVPAVQGFFRSISLSRGNNLQDTLRVLTLWFDYGHWPDVNEALVEGVKAIQIDTWLQVIPQLIARIDTPRPLVGRLIHQLLTDIGRYHPQALIYPLTVASKSTTTARHNAANKILKNMCEHSNTLVQQAMMVSEELIRVAILWHEMWHEGLEEASRLYFGERNVKGMFEVLEPLHAMMERGPQTLKETSFNQAYGRDLMEAQEWCRKYMKSGNVKDLTQAWDLYYHVFRRISKQLPQLTSLELQYVSPKLLMCRDLELAVPGTYDPNQPIIRIQSIAPSLQVITSKQRPRKLTLMGSNGHEFVFLLKGHEDLRQDERVMQLFGLVNTLLANDPTSLRKNLSIQRYAVIPLSTNSGLIGWVPHCDTLHALIRDYREKKKILLNIEHRIMLRMAPDYDHLTLMQKVEVFEHAVNNTAGDDLAKLLWLKSPSSEVWFDRRTNYTRSLAVMSMVGYILGLGDRHPSNLMLDRLSGKILHIDFGDCFEVAMTREKFPEKIPFRLTRMLTNAMEVTGLDGNYRITCHTVMEVLREHKDSVMAVLEAFVYDPLLNWRLMDTNTKGNKRSRTRTDSYSAGQSVEILDGVELGEPAHKKTGTTVPESIHSFIGDGLVKPEALNKKAIQIINRVRDKLTGRDFSHDDTLDVPTQVELLIKQATSHENLCQCYIGWCPFW

SEQ ID NO: 64 - protein, 1356 aa, Homo sapiens; identical to SEQ ID NO: 46

SEQ ID NO: 65 - protein, 400 aa, Homo sapiens [sequence omitted]

SEQ ID NO: 66 - protein, 1390 aa, Homo sapiens
MKAPAVLAPGILVLLFTLVQRSNGECKEALAKSEMNVNMKYQLPNFTAETPIQNVILHEHHIFLGATNYIYVLNEEDLQKVAEYKTGPVLEHPDCFPCQDCSSKANLSGGVWKDNINMALVVDTYYDDQLISCGSVNRGTCQRHVFPHNHTADIQSEVHCIFSPQIEEPSQCPDCVVSALGAKVLSSVKDRFINFFVGNTINSSYFPDHPLHSISVRRLKETKDGFMFLTDQSYIDVLPEFRDSYPIKYVHAFESNNFIYFLTVQRETLDAQTFHTRIIRFCSINSGLHSYMEMPLECILTEKRKKRSTKKEVFNILQAAYVSKPGAQLARQIGASLNDDILFGVFAQSKPDSAEPMDRSAMCAFPIKYVNDFFNKIVNKNNVRCLQHFYGPNHEHCFNRTLLRNSSGCEARRDEYRTEFTTALQRVDLFMGQFSEVLLTSISTFIKGDLTIANLGTSEGRFMQVVVSRSGPSTPHVNFLLDSHPVSPEVIVEHTLNQNGYTLVITGKKITKIPLNGLGCRHFQSCSQCLSAPPFVQCGWCHDKCVRSEECLSGTWTQQICLPAIYKVFPNSAPLEGGTRLTICGWDFGFRRNNKFDLKKTRVLLGNESCTLTLSESTMNTLKCTVGPAMNKHFNMSIIISNGHGTTQYSTFSYVDPVITSISPKYGPMAGGTLLTLTGNYLNSGNSRHISIGGKTCTLKSVSNSILECYTPAQTISTEFAVKLKIDLANRETSIFSYREDPIVYEIHPTKSFISGGSTITGVGKNLNSVSVPRMVINVHEAGRNFTVACQHRSNSEIICCTTPSLQQLNLQLPLKTKAFFMLDGILSKYFDLIYVHNPVFKPFEKPVMISMGNENVLEIKGNDIDPEAVKGEVLKVGNKSCENIHLHSEAVLCTVPNDLLKLNSELNIEWKQAISSTVLGKVIVQPDQNFTGLIAGVVSISTALLLLLGFFLWLKKRKQIKDLGSELVRYDARVHTPHLDRLVSARSVSPTTEMVSNESVDYRATFPEDQFPNSSQNGSCRQVQYPLTDMSPILTSGDSDISSPLLQNTVHIDLSALNPELVQAVQHVVIGPSSLIVHFNEVIGRGHFGCVYHGTLLDNDGKKIHCAVKSLNRITDIGEVSQFLTEGIIMKDFSHPNVLSLLGICLRSEGSPLVVLPYMKHGDLRNFIRNETHNPTVKDLIGFGLQVAKGMKYLASKKFVHRDLAARNCMLDEKFTVKVADFGLARDMYDKEYYSVHNKTGAKLPVKWMALESLQTQKFTTKSDVWSFGVLLWELMTRGAPPYPDVNTFDITVYLLQGRRLLQPEYCPDPLYEVMLKCWHPKAEMRPSFSELVSRISAIFSTFIGEHYVHVNATYVNVKCVAPYPSLLSSEDNADDEVDTRPASFWETS

SEQ ID NO: 67 - protein, 1068 aa, Homo sapiens
MPPRPSSGELWGIHLMPPRILVECLLPNGMIVTLECLREATLITIKHELFKEARKYPLHQLLQDESSYIFVSVTQEAEREEFFDETRRLCDLRLFQPFLKVIEPVGNREEKILNREIGFAIGMPVCEFDMVKDPEVQDFRRNILNVCKEAVDLRDLNSPHSRAMYVYPPNVESSPELPKHIYNKLDKGQIIVVIWVIVSPNNDKQKYTLKINHDCVPEQVIAEAIRKKTRSMLLSSEQLKLCVLEYQGKYILKVCGCDEYFLEKYPLSQYKYIRSCIMLGRMPNLMLMAKESLYSQLPMDCFTMPSYSRRISTATPYMNGETSTKSLWVINSALRIKILCATYVNVNIRDIDKIYVRTGIYHGGEPLCDNVNTQRVPCSNPRWNEWLNYDIYIPDLPRAARLCLSICSVKGRKGAKEEHCPLAWGNINLFDYTDTLVSGKMALNLWPVPHGLEDLLNPIGVTGSNPNKETPCLELEFDWFSSVVKFPDMSVIEEHANWSVSREAGFSYSHAGLSNRLARDNELRENDKEQLKAISTRDPLSEITEQEKDFLWSHRHYCVTIPEILPKLLLSVKWNSRDEVAQMYCLVKDWPPIKPEQAMELLDCNYPDPMVRGFAVRCLEKYLTDDKLSQYLIQLVQVLKYEQYLDNLLVRFLLKKALTNQRIGHFFFWHLKSEMHNKTVSQRFGLLLESYCRACGMYLKHLNRQVEAMEKLINLTDILKQEKKDETQKVQMKFLVEQMRRPDFMDALQGFLSPLNPAHQLGNLRLEECRIMSSAKRPLWLNWENPDIMSELLFQNNEIIFKNGDDLRQDMLTLQIIRIMENIWQNQGLDLRMLPYGCLSIGDCVGLIEVVRNSHTIMQIQCKGGLKGALQFNSHTLHQWLKDKNKGEIYDAAIDLFTRSCAGYCVATFILGIGDRHNSNIMVKDDGQLFHIDFGHFLDHKKKKFGYKRERVPFVLTQDFLIVISKGAQECTKTREFERFQEMCYKAYLAIRQHANLFINLFSMMLGSGMPELQSFDDIAYIRKTLALDKTEQEALEYFMKQMNDAHHGGWTTKMDWIFHTIKQHALN

SEQ ID NO: 68 - protein, 603 aa, Homo sapiens; identical to SEQ ID NO: 52

SEQ ID NO: 69 - protein, 1447 aa, Homo sapiens
MASAGNAAEPQDRGGGGSGCIGAPGRPAGGGRRRRTGGLRRAAAPDRDYLHRPSYCDAAFALEQISKGKATGRKAPLWLRAKFQRLLFKLGCYIQKNCGKFLVVGLLIFGAFAVGLKAANLETNVEELWVEVGGRVSRELNYTRQKIGEEAMFNPQLMIQTPKEEGANVLTTEALLQHLDSALQASRVHVYMYNRQWKLEHLCYKSGELITETGYMDQIIEYLYPCLIITPLDCFWEGAKLQSGTAYLLGKPPLRWTNFDPLEFLEELKKINYQVDSWEEMLNKAEVGHGYMDRPCLNPADPDCPATAPNKNSTKPLDMALVLNGGCHGLSRKYMHWQEELIVGGTVKNSTGKLVSAHALQTMFQLMTPKQMYEHFKGYEYVSHINWNEDKAAAILEAWQRTYVEVVHQSVAQNSTQKVLSFTTTTLDDILKSFSDVSVIRVASGYLLMLAYACLTMLRWDCSKSQGAVGLAGVLLVALSVAAGLGLCSLIGISFNAATTQVLPFLALGVGVDDVFLLAHAFSETGQNKRIPFEDRTGECLKRTGASVALTSISNVTAFFMAALIPIPALRAFSLQAAVVVVFNFAMVLLIFPAILSMDLYRREDRRLDIFCCFTSPCVSRVIQVEPQAYTDTHDNTRYSPPPPYSSHSFAHETQITMQSTVQLRTEYDPHTHVYYTTAEPRSEISVQPVTVTQDTLSCQSPESTSSTRDLLSQFSDSSLHCLEPPCTKWTLSSFAEKHYAPFLLKPKAKVVVIFLFLGLLGVSLYGTTRVRDGLDLTDIVPRETREYDFIAAQFKYFSFYNMYIVTQKADYPNIQHLLYDLHRSFSNVKYVMLEENKQLPKMWLHYFRDWLQGLQDAFDSDWETGKIMPNNYKNGSDDGVLAYKLLVQTGSRDKPIDISQLTKQRLVDADGIINPSAFYIYLTAWVSNDPVAYAASQANIRPHRPEWVHDKADYMPETRLRIPAAEPIEYAQFPFYLNGLRDTSDFVEAIEKVRTICSNYTSLGLSSYPNGYPFLFWEQYIGLRHWLLLFISVVLACTFLVCAVFLLNPWTAGIIVMVLALMTVELFGMMGLIGIKLSAVPVVILIASVGIGVEFTVHVALAFLTAIGDKNRRAVLALEHMFAPVLDGAVSTLLGVLMLAGSEFDFIVRYFFAVLAILTILGVLNGLVLLPVLLSFFGPYPEVSPANGLNRLPTPSPEPPPSVVRFAMPPGHTHSGSDSSDSEYSSQTTVSGLSEELRHYEAQQGAGGPAHQVIVEATENPVFAHSTVVHPESRHHPPSNPRQQPHLDSGSLPPGRQGQQPRRDPPREGLWPPLYRPRRDAFEISTEGHSGPSNRARWGPRGARSHNPRNPASTAMGSSVPGYCQPITTVTASASVTVAVHPPPVPGPGRNPRGGLCPGYPETDHGLFEDPHVPFHVRCERRDSKVEVIELQDVECEERPRGSSSN

SEQ ID NO: 70 - protein, 928 aa, Homo sapiens
MPPKTPRKTAATAAAAAAEPPAPPPPPPPEEDPEQDSGPEDLPLVRLEFEETEEPDFTALCQKLKIPDHVRERAWLTWEKVSSVDGVLGGYIQKKKELWGICIFIARVDLDEMSFTLLSYRKTYEISVHKFFNLLKEIDTSTKVDNAMSRLLKKYDVLFALFSKLERTCELIYLTQPSSSISTEINSALVLKVSWITFLLAKGEVLQMEDDLVISFQLMLCVLDYFIKLSPPMLLKEPYKTAVIPINGSPRTPRRGQNRSARIAKQLENDTRIIEVLCKEHECNIDEVKNVYFKNFIPFMNSLGLVTSNGLPEVENLSKRYEEIYLKNKDLDRRLFLDHDKTLQTDSIDSFETQRTPRKSNLDEEVNIIPPHTPVRTVMNTIQQLMMILNSASDQPSENLISYFNNCTVNPKESILKRVKDIGYIFKEKFAKAVGQGCVEIGSQRYKLGVRLYYRVMESMLKSEEERLSIQNFSKLLNDNIFHMSLLACALEVVMATYSRSTSQNLDSGTDLSFPWILNVLNLKAFDFYKVIESFIKAEGNLTREMIKHLERCEHRIMESLAWLSDSPLFDLIKQSKDREGPTDHLESACPLNLPLQNNHTAADMYLSPVRSPKKKGSTTRVNSTANAETQATSAFQTQKPLKSTSLSLFYKKVYRLAYLRLNTLCERLLSEHPELEHIIWTLFQHTLQNEYELMRDRHLDQIMMCSMYGICKVKNIDLKFKIIVTAYKDLPHAVQETFKRVLIKEEEYDSIIVFYNSVFMQRLKTNILQYASTRPPTLSPIPHIPRSPYKFPSSPLRIPGGNIYISPLKSPYKISEGLPTPTKMTPRSRILVSIGESFGTSEKFQKINQMVCNSDRVLKRSAEGSNPPKPLKKLRFDIEGSDEADGSKHLPGESKFQQKLAEMTSTRTRMQKQKMNDSMDTSNKEEK

SEQ ID NO: 71 - protein, 1072 aa, Homo sapiens
MAKATSGAAGLRLLLLLLLPLLGKVALGLYFSRDAYWEKLYVDQAAGTPLLYVHALRDAPEEVPSFRLGQHLYGTYRTRLHENNWICIQEDTGLLYLNRSLDHSSWEKLSVRNRGFPLLTVYLKVFLSPTSLREGECQWPGCARVYFSFFNTSFPACSSLKPRELCFPETRPSFRIRENRPPGTFHQFRLLPVQFLCPNISVAYRLLEGEGLPFRCAPDSLEVSTRWALDREQREKYELVAVCTVHAGAREEVVMVPFPVTVYDEDDSAPTFPAGVDTASAVVEFKRKEDTVVATLRVFDADVVPASGELVRRYTSTLLPGDTWAQQTFRVEHWPNETSVQANGSFVRATVHDYRLVLNRNLSISENRTMQLAVLVNDSDFQGPGAGVLLLHFNVSVLPVSLHLPSTYSLSVSRRARRFAQIGKVCVENCQAFSGINVQYKLHSSGANCSTLGVVTSAEDTSGILFVNDTKALRRPKCAELHYMVVATDQQTSRQAQAQLLVTVEGSYVAEEAGCPLSCAVSKRRLECEECGGLGSPTGRCEWRQGDGKGITRNFSTCSPSTKTCPDGHCDVVETQDINICPQDCLRGSIVGGHEPGEPRGIKAGYGTCNCFPEEEKCFCEPEDIQDPLCDELCRTVIAAAVLFSFIVSVLLSAFCIHCYHKFAHKPPISSAEMTFRRPAQAFPVSYSSSGARRPSLDSMENQVSVDAFKILEDPKWEFPRKNLVLGKTLGEGEFGKVVKATAFHLKGRAGYTTVAVKMLKENASPSELRDLLSEFNVLKQVNHPHVIKLYGACSQDGPLLLIVEYAKYGSLRGFLRESRKVGPGYLGSGGSRNSSSLDHPDERALTMGDLISFAWQISQGMQYLAEMKLVHRDLAARNILVAEGRKMKISDFGLSRDVYEEDSYVKRSQGRIPVKWMAIESLFDHIYTTQSDVWSFGVLLWEIVTLGGNPYPGIPPERLFNLLKTGHRMERPDNCSEEMYRLMLQCWKQEPDKRPVFADISKDLEKMMVKRRDYLDLAASTPSDSLIYDDGLSEEETPLVDCNNAPLPRALPSTWIENKLYGRISHAFTRF

SEQ ID NO: 72 - protein, 403 aa, Homo sapiens
MDRSKENCISGPVKATAPVGGPKRVLVTQQFPCQNPLPVNSGQAQRVLCPSNSSQRIPLQAQKLVSSHKPVQNQKQKQLQATSVPHPVSRPLNNTQKSKQPLPSAPENNPEEELASKQKNEESKKRQWALEDFEIGRPLGKGKFGNVYLAREKQSKFILALKVLFKAQLEKAGVEHQLRREVEIQSHLRHPNILRLYGYFHDATRVYLILEYAPLGTVYRELQKLSKFDEQRTATYITELANALSYCHSKRVIHRDIKPENLLLGSAGELKIADFGWSVHAPSSRRTTLCGTLDYLPPEMIEGRMHDEKVDLWSLGVLCYEFLVGKPPFEANTYQETYKRISRVEFTFPDFVTEGARDLISRLLKHNPSQRPMLREVLEHPWITANSSKPSNCQNKESASKQS

SEQ ID NO: 73 - protein, 567 aa, Homo sapiens
MGRGLLRGLWPLHIVLWTRIASTIPPHVQKSVNNDMIVTDNNGAVKFPQLCKFCDVRFSTCDNQKSCMSNCSITSICEKPQEVCVAVWRKNDENITLETVCHDPKLPYHDFILEDAASPKCIMKEKKKPGETFFMCSCSSDECNDNIIFSEEYNTSNPDLLLVIFQVTGISLLPPLGVAISVIIIFYCYRVNRQQKLSSTWETGKTRKLMEFSEHCAIILEDDRSDISSTCANNINHNTELLPIELDTLVGKGRFAEVYKAKLKQNTSEQFETVAVKIFPYEEYASWKTEKDIFSDINLKHENILQFLTAEERKTELGKQYWLITAFHAKGNLQEYLTRHVISWEDLRKLGSSLARGIAHLHSDHTPCGRPKMPIVHRDLKSSNILVKNDLTCCLCDFGLSLRLDPTLSVDDLANSGQVGTARYMAPEVLESRMNLENAESFKQTDVYSMALVLWEMTSRCNAVGEVKDYEPPFGSKVREHPCVESMKDNVLRDRGRPEIPSFWLNHQGIQMVCETLTECWDHDPEARLTAQCVAERFSELEHLDRLSGRSCSEEKIPEDGSLNTTK

SEQ ID NO: 74 - protein, 393 aa, Homo sapiens [sequence omitted]

SEQ ID NO: 75 - protein, 1308 aa, Homo sapiens; identical to SEQ ID NO: 61

SEQ ID NO: 76 - protein, 821 aa, Homo sapiens
MVSWGRFICLVVVTMATLSLARPSFSLVEDTTLEPEEPPTKYQISQPEVYVAAPGESLEVRCLLKDAAVISWTKDGVHLGPNNRTVLIGEYLQIKGATPRDSGLYACTASRTVDSETWYFMVNVTDAISSGDDEDDTDGAEDFVSENSNNKRAPYWTNTEKMEKRLHAVPAANTVKFRCPAGGNPMPTMRWLKNGKEFKQEHRIGGYKVRNQHWSLIMESVVPSDKGNYTCVVENEYGSINHTYHLDVVERSPHRPILQAGLPANASTVVGGDVEFVCKVYSDAQPHIQWIKHVEKNGSKYGPDGLPYLKVLKAAGVNTTDKEIEVLYIRNVTFEDAGEYTCLAGNSIGISFHSAWLTVLPAPGREKEITASPDYLEIAIYCIGVFLIACMVVTVILCRMKNTTKKPDFSSQPAVHKLTKRIPLRRQVTVSAESSSSMNSNTPLVRITTRLSSTADTPMLAGVSEYELPEDPKWEFPRDKLTLGKPLGEGCFGQVVMAEAVGIDKDKPKEAVTVAVKMLKDDATEKDLSDLVSEMEMMKMIGKHKNIINLLGACTQDGPLYVIVEYASKGNLREYLRARRPPGMEYSYDINRVPEEQMTFKDLVSCTYQLARGMEYLASQKCIHRDLAARNVLVTENNVMKIADFGLARDINNIDYYKKTTNGRLPVKWMAPEALFDRVYTHQSDVWSFGVLMWEIFTLGGSPYPGIPVEELFKLLKEGHRMDKPANCTNELYMMMRDCWHAVPSQRPTFKQLVEDLDRILTLTTNEEYLDLSQPLEQYSPSYPDTRSSCSSGDDSVFSPDPMPYEPCLPQYPHINGSVKT

SEQ ID NO: 77 - protein, 1166 aa, Homo sapiens
MANDSPAKSLVDIDLSSLRDPAGIFELVEVVGNGTYGQVYKGRHVKTGQLAAIKVMDVTEDEEEEIKLEINMLKKYSHHRNIATYYGAFIKKSPPGHDDQLWLVMEFCGAGSITDLVKNTKGNTLKEDWIAYISREILRGLAHLHIHHVIHRDIKGQNVLLTENAEVKLVDFGVSAQLDRTVGRRNTFIGTPYWMAPEVIACDENPDATYDYRSDLWSCGITAIEMAEGAPPLCDMHPMRALFLIPRNPPPRLKSKKWSKKFFSFIEGCLVKNYMQRPSTEQLLKHPFIRDQPNERQVRIQLKDHIDRTRKKRGEKDETEYEYSGSEEEEEEVPEQEGEPSSIVNVPGESTLRRDFLRLQQENKERSEALRRQQLLQEQQLREQEEYKRQLLAERQKRIEQQKEQRRRLEEQQRREREARRQQEREQRRREQEEKRRLEELERRRKEEEERRRAEEEKRRVEREQEYIRRQLEEEQRHLEVLQQQLLQEQAMLLHDHRRPHPQHSQQPPPPQQERSKPSFHAPEPKAHYEPADRAREVPVRTTSRSPVLSRRDSPLQGSGQQNSQAGQRNSTSSIEPRLLWERVEKLVPRPGSGSSSGSSNSGSQPGSHPGSQSGSGERFRVRSSSKSEGSPSQRLENAVKKPEDKKEVFRPLKPAGEVDLTALAKELRAVEDVRPPHKVTDYSSSSEESGTTDEEDDDVEQEGADESTSGPEDTRAASSLNLSNGETESVKTMIVHDDVESEPAMTPSKEGTLIVRQTQSASSTLQKHKSSSSFTPFIDPRLLQISPSSGTTVTSVVGFSCDGMRPEAIRQDPTRKGSVVNVNPTNTRPQSDTPEIRKYKKRFNSEILCAALWGVNLLVGTESGLMLLDRSGQGKVYPLINRRRFQQMDVLEGLNVLVTISGKKDKLRVYYLSWLRNKILHNDPEVEKKQGWTTVGDLEGCVHYKVVKYERIKFLVIALKSSVEVYAWAPKPYHKFMAFKSFGELVHKPLLVDLTVEEGQRLKVIYGSCAGFHAVDVDSGSVYDIYLPTHVRKNPHSMIQCSIKPHAIIILPNTDGMELLVCYEDEGVYVNTYGRITKDVVLQWGEMPTSVAYIRSNQTMGWGEKAIEIRSVETGHLDGVFMHKRAQRLKFLCERNDKVFFASVRSGGSSQVYFMTLGRTSLLSW

SEQ ID NO: 78 - protein, 436 aa, Homo sapiens
MRLARLLRGAALAGPGPGLRAAGFSRSFSSDSGSSPASERGVPGQVDFYARFSPSPLSMKQFLDFGSVNACEKTSFMFLRQELPVRLANIMKEISLLPDNLLRTPSVQLVQSWYIQSLQELLDFKDKSAEDAKAIYDFTDTVIRIRNRHNDVIPTMAQGVIEYKESFGVDPVTSQNVQYFLDRFYMSRISIRMLLNQHSLLFGGKGKGSPSHRKHIGSINPNCNVLEVIKDGYENARRLCDLYYINSPELELEELNAKSPGQPIQVVYVPSHLYHMVFELFKNAMRATMEHHANRGVYPPIQVHVTLGNEDLTVKMSDRGGGVPLRKIDRLFNYMYSTAPRPRVETSRAVPLAGFGYGLPISRLYAQYFQGDLKLYSLEGYGTDAVIYIKALSTDSIERLPVYNKAAWKHYNTNHEADDWCVPSREPKDMTTFRSA

SEQ ID NO: 79 - protein, 928 aa, Homo sapiens
MPPKTPRKTAATAAAAAAEPPAPPPPPPPEEDPEQDSGPEDLPLVRLEFEETEEPDFTALCQKLKIPDHVRERAWLTWEKVSSVDGVLGGYIQKKKELWGICIFIAAVDLDEMSFTFTELQKNIEISVHKFFNLLKEIDTSTKVDNAMSRLLKKYDVLFALFSKLERTCELIYLTQPSSSISTEINSALVLKVSWITFLLAKGEVLQMEDDLVISFQLMLCVLDYFIKLSPPMLLKEPYKTAVIPINGSPRTPRRGQNRSARIAKQLENDTRIIEVLCKEHECNIDEVKNVYFKNFIPFMNSLGLVTSNGLPEVENLSKRYEEIYLKNKDLDARLFLDHDKTLQTDSIDSFETQRTPRKSNLDEEVNVIPPHTPVRTVMNTIQQLMMILNSASDQPSENLISYFNNCTVNPKESILKRVKDIGYIFKEKFAKAVGQGCVEIGSQRYKLGVRLYYRVMESMLKSEEERLSIQNFSKLLNDNIFHMSLLACALEVVMATYSRSTSQNLDSGTDLSFPWILNVLNLKAFDFYKVIESFIKAEGNLTREMIKHLERCEHRIMESLAWLSDSPLFDLIKQSKDREGPTDHLESACPLNLPLQNNHTAADMYLSPVRSPKKKGSTTRVNSTANAETQATSAFQTQKPLKSTSLSLFYKKVYRLAYLRLNTLCERLLSEHPELEHIIWTLFQHTLQNEYELMRDRHLDQIMMCSMYGICKVKNIDLKFKIIVTAYKDLPHAVQETFKRVLIKEEEYDSIIVFYNSVFMQRLKTNILQYASTRPPTLSPIPHIPRSPYKFPSSPLRIPGGNIYISPLKSPYKISEGLPTPTKMTPRSRILVSIGESFGTSEKFQKINQMVCNSDRVLKRSAEGSNPPKPLKKLRFDIEGSDEADGSKHLPGESKFQQKLAEMTSTRTRMQKQKMNDSMDTSNKEEK

1.-61. (canceled)

62. A method of classifying a tumor in a mammal, the method comprising detecting the presence of a variation in FBXW7 or FBXW7 polynucleotide in a biological sample derived from the mammal, wherein the biological sample comprises non-small cell lung carcinoma cells.

63. The method of claim 62, wherein the variation is an amino acid variation in FBXW7.

64. The method of claim 63, wherein the amino acid variation in FBXW7 is in the WD40 domain.

65. The method of claim 64, wherein the amino acid variation is at an amino acid position selected from G343, R399, and Y429.

66. The method of claim 62, wherein the variation is a nucleotide variation in an FBXW7 polynucleotide.

67. The method of claim 66, wherein the nucleotide variation is in a region of an FBXW7 polynucleotide encoding the WD40 domain.

68. The method of claim 67, wherein the nucleotide variation is at a nucleotide position selected from C153607116, C153604971, and T153604881 of chromosome 4.

69. The method of claim 68, wherein the nucleotide variation is a nucleotide change selected from C153607116T, C153604971T, and T153604881A.

70. A method for predicting whether a non-small cell lung carcinoma will respond to a therapeutic agent that targets FBXW7 or FBXW7 polynucleotide, the method comprising determining whether the non-small cell lung carcinoma comprises a variation in FBXW7 or FBXW7 polynucleotide, wherein the presence of a variation indicates that the non-small cell lung carcinoma will respond to the therapeutic agent.

71. The method of claim 70 wherein the variation is an amino acid variation in FBXW7.

72. The method of claim 71, wherein the amino acid variation in FBXW7 is in the WD40 domain.

73. The method of claim 72, wherein the amino acid variation is at an amino acid position selected from G343, R399, and Y429.

74. The method of claim 70, wherein the variation is a nucleotide variation in an FBXW7 polynucleotide.

75. The method of claim 74, wherein the nucleotide variation is in a region of an FBXW7 polynucleotide encoding the WD40 domain.

76. The method of claim 75, wherein the nucleotide variation is at a nucleotide position selected from C153607116, C153604971, and T153604881 of chromosome 4.

77. The method of claim 76, wherein the nucleotide variation is a nucleotide change selected from C153607116T, C153604971T, and T153604881A.
